(19) United States
(12) Patent Application Publication
(10) Pub. No.: US 2019/0338311 A1
(43) Pub. Date: Nov. 7, 2019

(54) OPTIMIZED STRATEGY FOR EXON SKIPPING MODIFICATIONS USING CRISPR/CAS9 WITH TRIPLE GUIDE SEQUENCES

(71) Applicant: The Board of Regents of the University of Texas System, Austin, TX (US)

(72) Inventors: Leonela AMOASII, Dallas, TX (US); Eric OLSON, University Park, TX (US)

(73) Assignee: The Board of Regents of the University of Texas System, Austin, TX (US)

(21) Appl. No.: 16/476,137

(22) PCT Filed: Jan. 5, 2018
(86) PCT No.: PCT/US18/12558

§ 371 Date: Jul. 5, 2019

Related U.S. Application Data
(60) Provisional application No. 62/442,606, filed on Jan. 5, 2017.
(60) Provisional application No. 62/544,449, filed on Aug. 11, 2017.
(60) Provisional application No. 62/596,298, filed on Dec. 8, 2017.

(51) Int. Cl. C12N 15/86; C12N 15/113; C07K 14/47; C12N 9/22; C12N 15/90; C12N 5/077; C12N 5/074

(52) U.S. Cl. CPC C12N 15/86; C12N 15/113; C07K 14/4708; C12N 9/22; C12N 15/907; C12N 5/066; A61P 21/00; C12N 5/0657; C12N 5/0696; C12N 2310/20; C12N 2320/33; C12N 2330/51; C12N 2750/14143; C12N 5/0661

(57) ABSTRACT

CRISPR/Cas9-mediated genome editing holds clinical potential for treating genetic diseases, such as Duchenne muscular dystrophy (DMD), which is caused by mutations in the dystrophin gene. Here, using three promoters to drive expression of the same DMD guide RNA, a more robust and safe form of genome editing was achieved in a humanized mouse model for DMD with a deletion 13 in exon 50, and in a ΔEx50-MD Dog.

### PRIORITY CLAIM

[0001] The present application claims benefit of priority to U.S. Provisional Application Ser. No. 62/596,298, filed December 8, 2017, U.S. Provisional Application Ser. No. 62/544,499, filed Aug. 11, 2017, and U.S. Provisional Application Ser. No. 62/442,606, filed Jan. 5, 2017, the entire contents of which are hereby incorporated by reference in their entireties.

### FEDERAL FUNDING SUPPORT CLAUSE

[0002] This invention was made with government support under grant no. U54 HD 087351 awarded by National Institutes of Health. The government has certain rights in the invention.

### SEQUENCE LISTING

[0003] The instant application contains a Sequence Listing which has been submitted electronically in ASCII format and is hereby incorporated by reference in its entirety. Said ASCII copy, created on Jan. 5, 2018, is named UTFD P3178WO.txt and is 1,316,974 bytes in size.

### FIELD OF THE DISCLOSURE

[0004] The present disclosure relates to the fields of molecular biology, medicine and genetics. More particularly, the disclosure relates to compositions and uses thereof for genome editing to correct mutations in vivo using an exon-skipping approach.

### BACKGROUND

[0005] Muscular dystrophies (MD) are a group of more than 30 genetic diseases characterized by progressive weakness and degeneration of the skeletal muscles that control movement. Duchenne muscular dystrophy (DMD) is one of the most severe forms of MD that affects approximately 1 in 5000 boys and is characterized by progressive muscle weakness and premature death. Cardiomyopathy and heart failure are common, incurable and lethal features of DMD. The disease is caused by mutations in the gene encoding dystrophin (DMD), a large intracellular protein that links the dystroglycan complex at the cell surface with the underlying cytoskeleton, thereby maintaining integrity of the muscle cell membrane during contraction. Mutations in the dystrophin gene result in loss of expression of dystrophin, causing muscle membrane fragility and progressive muscle wasting.

### SUMMARY

[0006] Despite intense efforts to find cures through a variety of approaches, including myoblast transfer, viral delivery, and oligonucleotide-mediated exon skipping, there remains no cure for any type of muscular dystrophy. The present inventors recently used clustered regularly interspaced short palindromic repeat/Cas9 (CRISPR/Cas9)-mediated genome editing to correct the dystrophin gene (DMD) mutation in postnatal mdx mice, a model for DMD. In vivo AAV-mediated delivery of gene-editing components successfully removed the mutant genomic sequence by exon skipping in the cardiac and skeletal muscle cells of mdx mice. Using different modes of AAV9 delivery, the inventors restored dystrophin protein expression in cardiac and skeletal muscle of mdx mice. The mdx mouse model and the correction exon 23 using AAV delivery of myoediting machinery has been useful to show proof-of concept of exon skipping approach using several cuts in the genomic region encompassing the mutation in vivo. However, more efficient and safe approaches to genome editing and DMD would provide a more powerful means to intervene in this disease.

[0007] In some embodiments, a nucleic acid comprises a sequence encoding a first DMD guide RNA targeting a first genomic target sequence, a sequence encoding a second DMD guide RNA targeting a second genomic target sequence, a sequence encoding a first promoter wherein the first promoter drives expression of the sequence encoding the first DMD guide RNA, and a sequence encoding a second promoter wherein the first promoter drives expression of the sequence encoding the second DMD guide RNA, wherein the first genomic target sequence and the second genomic target sequence each comprise a dystrophin splice acceptor site. In some embodiments, the sequence encoding the first promoter and the sequence encoding the second promoter are identical. In some embodiments, the sequence encoding the first promoter and the sequence encoding the second promoter not identical. In some embodiments, the sequence encoding the first promoter and the sequence encoding the second promoter share at least 50%, 60%, 70%, 80%, 90%, or 95% sequence identity. In some embodiments, the first genomic target sequence and the second genomic target sequence are identical. In some embodiments, the first genomic target sequence and the second genomic target sequence are not identical. In some embodiments, the first genomic target sequence and the second genomic target sequence share at least 50%, 60%, 70%, 80%, 90%, or 95% sequence identity. In some embodiments, the first genomic target sequence and the second genomic target sequence are complementary. In some embodiments, the nucleic acid further comprises a sequence encoding a third DMD guide RNA targeting a third genomic target sequence, and a sequence encoding a third promoter wherein the third promoter drives expression of the sequence encoding the third DMD guide RNA, and wherein the third genomic target sequence comprises a dystrophin splice acceptor site. In some embodiments, at least two of the sequences encoding the first promoter, the sequence encoding the second promoter, and the sequence encoding the third promoter are identical. In some embodiments, at least two of the sequence encoding the first promoter, the sequence encoding the second promoter, and the sequence encoding the third promoter are not identical. In some embodiments, at least two of the sequences encoding the first promoter, the sequence encoding the second promoter, and the sequence encoding the third promoter share at least 50%, 60%, 70%, 80%, 90%, or 95% sequence identity. In some embodiments, at least two of the first genomic target sequence, the second genomic target sequence, and the third genomic target sequence are identical. In some embodiments, at least two of the first genomic target sequence, the second genomic target sequence, and the third genomic target sequence are not identical. In some embodiments, at least two of the the first genomic target sequence, the second genomic target sequence, and the third genomic target sequence share at least 50%, 60%, 70%, 80%, 90%, or 95% sequence identity. In some embodiments, at least two of the first genomic target sequence, the second genomic target sequence, and the third genomic target sequence are complementary. In some embodiments, the nucleic acid further comprises a sequence encoding a fourth DMD guide RNA targeting a fourth genomic target sequence, and a sequence encoding a fourth promoter, wherein the fourth promoter drives expression of the fourth sequence encoding a DMD guide RNA, wherein the fourth genomic target sequence comprises a dystrophin splice acceptor site. In some embodiments, at least two of the sequence encoding the first promoter, the sequence encoding the second promoter, the sequence encoding the third promoter, and the sequence encoding the fourth promoter are identical. In some embodiments, at least two of the sequence encoding the first promoter, the sequence encoding the second promoter, the sequence encoding the third promoter, and the sequence encoding the fourth promoter are not identical. In some embodiments, at least two of the sequence encoding the first promoter, the sequence encoding the second promoter, the sequence encoding the third promoter, and the sequence encoding the fourth promoter share at least 50%, 60%, 70%, 80%, 90%, or 95% sequence identity. In some embodiments, at least two of the first genomic target sequence, the second genomic target sequence, the third genomic target sequence, and the fourth genomic target sequence are identical. In some embodiments, at least two of the first genomic target sequence, the second genomic target sequence, the third genomic target sequence, and the fourth genomic target sequence are not identical. In some embodiments, at least two of the first genomic target sequence, the second genomic target sequence, the third genomic target sequence, and the fourth genomic target sequence share at least 50%, 60%, 70%, 80%, 90%, or 95% sequence identity. In some embodiments, at least two of the first genomic target sequence, the second genomic target sequence, the third genomic target sequence, and the fourth genomic target sequence are complementary. In some embodiments, the nucleic acid further comprises a sequence encoding a fifth DMD guide RNA targeting a fifth genomic target sequence, and a sequence encoding a fifth promoter, wherein the fifth promoter drives expression of the sequence encoding the fifth DMD guide RNA, wherein the fifth genomic target sequence comprises a dystrophin splice acceptor site. In some embodiments, at least two of the sequence encoding the first promoter, the sequence encoding the second promoter, the sequence encoding the third promoter, the sequence encoding the fourth promoter, and the sequence encoding the fifth promoter are identical. In some embodiments, at least two of the sequence encoding the first promoter, the sequence encoding the second promoter, the sequence encoding the third promoter, the sequence encoding the fourth promoter, and the sequence encoding the fifth promoter are not identical. In some embodiments, at least two of the sequence encoding the first promoter, the sequence encoding the second promoter, the sequence encoding the third promoter, the sequence encoding the fourth promoter, and the sequence encoding the fifth promoter share at least 50%, 60%, 70%, 80%, 90%, or 95% sequence identity. In some embodiments, at least two of the first genomic target sequence, the second genomic target sequence, the third genomic target sequence, the fourth genomic target sequence, and the fifth genomic target sequence are identical. In some embodiments, at least two of the first genomic target sequence, the second genomic target sequence, the third genomic target sequence, the fourth genomic target sequence, and the fifth genomic target sequence are not identical. In some embodiments, at least two of the first genomic target sequence, the second genomic target sequence, the third genomic target sequence, the fourth genomic target sequence, and the fifth genomic target sequence share at least 50%, 60%, 70%, 80%, 90%, or 95% sequence identity. In some embodiments, at least two of the first genomic target sequence, the second genomic target sequence, the third genomic target sequence, the fourth genomic target sequence, and the fifth genomic target sequence are complementary. In some embodiments, the nucleic acid further comprises at least one sequence encoding an additional DMD guide RNA targeting a genomic target sequence, and at least one additional promoter, wherein the additional promoter drives expression of the sequence encoding the additional DMD guide RNA, wherein the additional genomic target sequence comprises a dystrophin splice acceptor site. In some embodiments, the dystrophin splice acceptor site comprises the 5′ splice acceptor site of exon 51. In some embodiments, the sequence encoding the first promoter or the sequence encoding the second promoter comprises a sequence encoding a constitutive promoter. In some embodiments, the first promoter or the second promoter comprises a constitutive promoter. In some embodiments, at least one of the sequence encoding the first promoter, the sequence encoding the second promoter, the sequence encoding the third promoter, the sequence encoding the fourth promoter, and the sequence encoding the fifth promoter comprises a sequence encoding a constitutive promoter. In some embodiments, at least one of the first promoter, the second promoter, the third promoter, the fourth promoter, and the fifth promoter comprises a constitutive promoter. In some embodiments, the sequence encoding the first promoter or the sequence encoding the second promoter comprises a sequence encoding an inducible promoter. In some embodiments, at least one of the first promoter, the second promoter, the third promoter, the fourth promoter, and the fifth promoter comprises an inducible promoter. In some embodiments, the sequence encoding the first promoter or the sequence encoding the second promoter comprises a sequence encoding a cell-type specific promoter. In some embodiments, at least one of the sequence encoding the first promoter, the sequence encoding the second promoter, the sequence encoding the third promoter, the sequence encoding the fourth promoter, and the sequence encoding the fifth promoter comprises a cell-type specific promoter. In some embodiments, the cell type specific promoter comprises a muscle-specific promoter. In some embodiments, the sequence encoding the first promoter or the sequence encoding the second promoter comprises a sequence encoding a U6 promoter, an H1 promoter, or a 7SK promoter. In some embodiments, at least one of the sequence encoding the first promoter, the sequence encoding the second promoter, the sequence encoding the third promoter, the sequence encoding the fourth promoter, and the sequence encoding the fifth promoter comprises a U6 promoter, an H1 promoter, or a 7SK promoter. In some embodiments, at least one of the sequence encoding the first promoter, the sequence encoding the second promoter, the sequence encoding the third promoter, the sequence encoding the fourth promoter, and the sequence encoding the fifth promoter comprises a U6 promoter. In some embodiments, at least one of the sequence encoding the first promoter, the sequence encoding the second promoter, the sequence encoding the third promoter, the sequence encoding the fourth promoter, and the sequence encoding the fifth promoter comprises an H1 promoter. In some embodiments, at least one of the sequence encoding the first promoter, the sequence encoding the second promoter, the sequence encoding the third promoter, the sequence encoding the fourth promoter, and the sequence encoding the fifth promoter comprises a 7SK promoter. In some embodiments, the sequence encoding the first DMD guide RNA, the sequence encoding the second DMD guide RNA, and sequence encoding the third DMD guide RNA are identical, and the 5′ splice acceptor site comprises a 5′ splice acceptor site of exon 51. In some embodiments, the sequence encoding the first promoter comprises a sequence encoding a U6 promoter, the sequence encoding the second promoter comprises a sequence encoding an H1 promoter, and the sequence encoding the third promoter comprises a 7SK promoter. In some embodiments, the nucleic acid comprises a DNA sequence. In some embodiments, the nucleic acid comprises an RNA sequence. In some embodiments, the nucleic acid further comprises one or more sequences encoding an inverted terminal repeat (ITR). In some embodiments, the nucleic acid further comprises a sequence encoding a 5′ inverted terminal repeat (ITR) and a sequence encoding a 3′ ITR. In some embodiments, the sequence encoding the 5′ inverted terminal repeat (ITR) or the sequence encoding a 3′ ITR comprises a sequence isolated or derived from an adeno-associated virus (AAV). In some embodiments, the sequence encoding the 5′ inverted terminal repeat (ITR) or the sequence encoding a 3′ ITR comprises a sequence isolated or derived from an adeno-associated virus (AAV) of serotype 2 (AAV2). In some embodiments, the sequence encoding the 5′ inverted terminal repeat (ITR) and the sequence encoding a 3′ ITR comprises a sequence isolated or derived from an AAV2. In some embodiments, the sequence encoding the 5′ inverted terminal repeat (ITR) or the sequence encoding a 3′ ITR comprises a sequence isolated or derived from an adeno-associated virus (AAV) of serotype 4 (AAV4). In some embodiments, the sequence encoding the 5′ inverted terminal repeat (ITR) and the sequence encoding a 3′ ITR comprises a sequence isolated or derived from an AAV4. In some embodiments, the sequence encoding the 5′ inverted terminal repeat (ITR) or the sequence encoding a 3′ ITR comprises or consists of 145 nucleotides. In some embodiments, the sequence encoding the 5′ inverted terminal repeat (ITR) or the sequence encoding a 3′ ITR comprises or consists of 115 nucleotides. In some embodiments, the sequence encoding the 5′ inverted terminal repeat (ITR) or the sequence encoding a 3′ ITR comprises or consists of 141 nucleotides. In some embodiments, the nucleic acid further comprises a polyadenosine (poly A) sequence. In some embodiments, the poly A sequence is a mini poly A sequence. In some embodiments, the sequence encoding the first DMD guide

[0008] RNA or the sequence encoding the second DMD guide RNA comprises the sequence of any one of SEQ ID NOs. 60-382, 706-708 and 712-789. In some embodiments, the sequence encoding the first DMD guide RNA or the sequence encoding the second DMD guide RNA comprises the sequence of SEQ ID NO. 714.

[0009] Also provided is a vector comprising a nucleic acid comprising a sequence encoding a first DMD guide RNA targeting a first genomic target sequence, a sequence encoding a second DMD guide RNA targeting a second genomic target sequence, a sequence encoding a first promoter wherein the first promoter drives expression of the sequence encoding the first DMD guide RNA, and a sequence encoding a second promoter wherein the first promoter drives expression of the sequence encoding the second DMD guide RNA, wherein the first genomic target sequence and the second genomic target sequence each comprise a dystrophin splice acceptor site. In some embodiments, the vector further comprises a sequence encoding an inverted terminal repeat of a transposable element. In some embodiments, the transposable element is a transposon. In some embodiments, the transposon is a Tn7 transposon. In some embodiments, the vector is a non-viral vector. In some embodiments, the non-viral vector is a plasmid. In some embodiments, the vector is a viral vector. In some embodiments, the viral vector is an adeno-associated viral (AAV) vector. In some embodiments, the AAV vector is replication-defective or conditionally replication defective. In some embodiments, the AAV vector is a recombinant AAV vector. In some embodiments, the AAV vector comprises a sequence isolated or derived from an AAV vector of serotype 1 (AAV1), 2 (AAV2), 3 (AAV3), 4 (AAV4), 5 (AAV S), 6 (AAV6), 7 (AAV7), 8 (AAV8), 9 (AAV9), 10 (AAV10), 11 (AAV11) or any combination thereof. In some embodiments, the AAV vector comprises a sequence isolated or derived from an AAV vector of serotype 9 (AAV9). In some embodiments, the AAV vector comprises a sequence isolated or derived from an AAV vector of serotype 2 (AAV2). In some embodiments, the AAV vector comprises a sequence isolated or derived from an AAV2 and a sequence isolated or derived from an AAV9. In some embodiments, the AAV vector comprises a sequence isolated or derived from an AAV4 and a sequence isolated or derived from an AAV9. In some embodiments, the vector is optimized for expression in mammalian cells. In some embodiments, the vector is optimized for expression in human cells. In some embodiments, the vector comprises the sequence of SEQ ID NO. 914, SEQ ID NO. 915, SEQ ID NO. 916, or SEQ ID NO. 917.

[0010] Also provided is a nucleic acid comprising a sequence encoding a promoter and a sequence encoding a Cas9 or a nuclease domain thereof, wherein the sequence encoding the promoter comprises a sequence encoding a muscle-specific promoter. In some embodiments, the sequence encoding the muscle-specific promoter comprises a sequence encoding a CK8 promoter. In some embodiments, the sequence encoding the muscle-specific promoter comprises a sequence encoding a CK8e promoter. In some embodiments, the sequence encoding the Cas9 or the nuclease domain thereof is isolated or derived from a sequence encoding an S. pyogenes Cas9 or a nuclease domain thereof. In some embodiments, the sequence encoding the Cas9 or the nuclease domain thereof is isolated or derived from a sequence encoding S. aureus Cas9 or a nuclease domain thereof. In some embodiments, the sequence encoding the Cas9 or the nuclease domain thereof is codon optimized for expression in a mammal. In some embodiments, the sequence encoding the Cas9 or the nuclease domain thereof is codon optimized for expression in a human. In some embodiments, the nucleic acid further comprises a polyA sequence. In some embodiments, the polyA sequence is a mini polyA sequence. In some embodiments, the nucleic acid further comprises one or more sequences encoding an inverted terminal repeat (ITR). In some embodiments, the nucleic acid further comprises a sequence encoding a 5′ inverted terminal repeat (ITR) and a sequence encoding a 3′ ITR. In some embodiments, the sequence encoding the 5′ inverted terminal repeat (ITR) or the sequence encoding a 3′ ITR comprises a sequence isolated or derived from an adeno-associated virus (AAV). In some embodiments, the sequence encoding the 5′ inverted terminal repeat (ITR) or the sequence encoding a 3′ ITR comprises a sequence isolated or derived from an adeno-associated virus (AAV) of serotype 2 (AAV2). In some embodiments, the sequence encoding the 5′ inverted terminal repeat (ITR) and the sequence encoding a 3′ ITR comprises a sequence isolated or derived from an AAV2. In some embodiments, the sequence encoding the 5′ inverted terminal repeat (ITR) or the sequence encoding a 3′ ITR comprises a sequence isolated or derived from an adeno-associated virus (AAV) of serotype 4 (AAV4). In some embodiments, the sequence encoding the 5′ inverted terminal repeat (ITR) and the sequence encoding a 3′ ITR comprises a sequence isolated or derived from an AAV4. In some embodiments, the sequence encoding the 5′ inverted terminal repeat (ITR) or the sequence encoding a 3′ ITR comprises or consists of 145 nucleotides, 115 nucleotides, or 141 nucleotides. In some embodiments, the nucleic acid further comprises a nuclear localization signal. In some embodiments, the nucleic acid is optimized for expression in mammalian cells. In some embodiments, the nucleic acid is optimized for expression in human cells.

[0011] Also provided is a vector comprising a nucleic acid comprising a sequence encoding a promoter and a sequence encoding a Cas9 or a nuclease domain thereof, wherein the sequence encoding the promoter comprises a sequence encoding a muscle-specific promoter such as the CK8 or CK8e promoter. In some embodiments, the vector further comprises a sequence encoding an inverted terminal repeat (ITR) of a transposable element. In some embodiments, the transposable element is a transposon. In some embodiments, the transposon is a Tn7 transposon. In some embodiments, the vector further comprises a sequence encoding a 5′ ITR of a T7 transposon and a sequence encoding a 3′ ITR of a T7 transposon. In some embodiments, the vector is a non-viral vector. In some embodiments, the non-viral vector is a plasmid. In some embodiments, the vector is a viral vector. In some embodiments, the viral vector is an adeno-associated viral (AAV) vector. In some embodiments, the AAV vector is replication-defective or conditionally replication defective. In some embodiments, the AAV vector is a recombinant AAV vector. In some embodiments, the AAV vector comprises a sequence isolated or derived from an AAV vector of serotype 1 (AAV1), 2 (AAV2), 3 (AAV3), 4 (AAV4), 5 (AAV S), 6 (AAV6), 7 (AAV7), 8 (AAV8), 9 (AAV9), 10 (AAV10), 11 (AAV11) or any combination thereof. In some embodiments, the AAV vector comprises a sequence isolated or derived from an AAV vector of serotype 9 (AAV9). In some embodiments, the AAV vector comprises a sequence isolated or derived from an AAV vector of serotype 2 (AAV2). In some embodiments, the AAV vector comprises a sequence isolated or derived from an AAV2 and a sequence isolated or derived from an AAV9. In some embodiments, the AAV vector comprises a sequence isolated or derived from an AAV vector of serotype 4 AAV4). In some embodiments, the AAV vector comprises a sequence isolated or derived from an AAV4 and a sequence isolated or derived from an AAV9. In some embodiments, wherein the vector is optimized for expression in mammalian cells. In some embodiments, the vector is optimized for expression in human cells. In some embodiments, the vector comprises the nucleic acid sequence of SEQ ID NO. 899, SEQ ID NO. 900, SEQ ID NO. 901, or SEQ ID NO. 902.

[0012] Also provided is a cell comprising one or more nucleic acids of the disclosure. In some embodiments, the cell is a human cell. In some embodiments, the cell is a muscle cell or satellite cell. In some embodiments, the cell is an induced pluripotent stem (iPS) cell.

[0013] Also provided is a composition comprising one or more nucleic acids of the disclosure. In some embodiments, the composition further comprises a pharmaceutically acceptable carrier.

[0014] Also provided is a composition comprising a cell comprising one or more nucleic acids of the disclosure. In some embodiments, the composition further comprises a pharmaceutically acceptable carrier.

[0015] Also provided is a composition comprising one or more vectors of the disclosure. In some embodiments, the composition further comprises a pharmaceutically acceptable carrier.

[0016] Also provided is a cell comprising a composition comprising one or more vectors of the disclosure. In some embodiments, the cell is a human cell. In some embodiments, the cell is a muscle cell or satellite cell. In some embodiments, the cell is an induced pluripotent stem (iPS) cell.

[0017] In some embodiments, a composition comprises (i) a first nucleic acid sequence comprising a sequence encoding a first DMD guide RNA targeting a first genomic target sequence, a sequence encoding a second DMD guide RNA targeting a second genomic target sequence, a sequence encoding a first promoter wherein the first promoter drives expression of the sequence encoding the first DMD guide RNA, and a sequence encoding a second promoter wherein the first promoter drives expression of the sequence encoding the second DMD guide RNA, wherein the first genomic target sequence and the second genomic target sequence each comprise a dystrophin splice acceptor and (ii) a second nucleic acid sequence comprising a sequence encoding a promoter and a sequence encoding a Cas9 or a nuclease domain thereof, wherein the sequence encoding the promoter comprises a sequence encoding a muscle-specific promoter such as the CK8 or CK8e promoter. In some embodiments, the composition further comprises a pharmaceutically acceptable carrier.

[0018] In some embodiments, a composition comprises (i) a first vector comprising a nucleic acid sequence comprising a sequence encoding a first DMD guide RNA targeting a first genomic target sequence, a sequence encoding a second DMD guide RNA targeting a second genomic target sequence, a sequence encoding a first promoter wherein the first promoter drives expression of the sequence encoding the first DMD guide RNA, and a sequence encoding a second promoter wherein the first promoter drives expression of the sequence encoding the second DMD guide RNA, wherein the first genomic target sequence and the second genomic target sequence each comprise a dystrophin splice acceptor and (ii) a second vector comprising a nucleic acid sequence comprising a sequence encoding a promoter and a sequence encoding a Cas9 or a nuclease domain thereof, wherein the sequence encoding the promoter comprises a sequence encoding a muscle-specific promoter such as the CK8 or CK8e promoter. In some embodiments, at least one of the first vector and the second vectors are AAVs. In some embodiments, the composition further comprises a pharmaceutically acceptable carrier.

[0019] Also provided is a method for correcting a dystrophin defect, the method comprising contacting a cell with one or more compositions of the disclosure under conditions suitable for expression of the first DMD guide RNA, the second DMD guide RNA and the Cas9 protein or a nuclease domain thereof, wherein at least one of first DMD guide RNA or the second DMD guide RNA forms a complex with the Cas9 protein or the nuclease domain thereof to form at least one DMD guide RNA-Cas9 complex, wherein the at least one DMD guide RNA-Cas9 complex disrupts a dystrophin splice site and induces selective skipping of a DMD exon.

[0020] Also provided is a method for correcting a dystrophin defect, the method comprising contacting a cell with one or more compositions of the disclosure under conditions suitable for expression of the first DMD guide RNA, the second DMD guide RNA and the Cas9 protein or a nuclease domain thereof, wherein at least one of first DMD guide RNA or the second DMD guide RNA forms a complex with the Cas9 protein or the nuclease domain thereof to form at least one DMD guide RNA-Cas9 complex, wherein the at least one DMD guide RNA-Cas9 complex induces a reframing of a dystrophin reading frame. In some embodiments, the reframing of a dystrophin reading frame induces an insertion. In some embodiments, the insertion comprises or consists of a single adenosine nucleotide.

[0021] Also provided is a method for inducing selective skipping of a DMD exon, the method comprising contacting a cell with one or more compositions of the disclosure under conditions suitable for expression of the first DMD guide RNA, the second DMD guide RNA and the Cas9 protein or a nuclease domain thereof, wherein at least one of first DMD guide RNA or the second DMD guide RNA forms a complex with the Cas9 protein or the nuclease domain thereof to form at least one DMD guide RNA-Cas9 complex, wherein the at least one DMD guide RNA-Cas9 complex disrupts a dystrophin splice site and induces selective skipping of a DMD exon.

[0022] Also provided is a method for inducing a reframing event in the dystrophin reading frame, the method comprising contacting a cell with one or more compositions of the disclosure under conditions suitable for expression of the first DMD guide RNA, the second DMD guide RNA and the Cas9 protein or a nuclease domain thereof, wherein at least one of first DMD guide RNA or the second DMD guide RNA forms a complex with the Cas9 protein or the nuclease domain thereof to form at least one DMD guide RNA-Cas9 complex, wherein the at least one DMD guide RNA-Cas9 complex disrupts a dystrophin splice site and induces selective skipping of a DMD exon. In some embodiments, the at least one DMD guide RNA-Cas9 complex disrupts a dystrophin splice site and induces selective skipping of exon 51 of a human DMD gene.

[0023] Also provided is a method of treating muscular dystrophy in a subject in need thereof comprising administering to the subject a therapeutically effective amount of one or more compositions of the disclosure. In some embodiments, the composition is administered locally. In some embodiments, the composition is administered directly to a muscle tissue. In some embodiments, the composition is administered by an intramuscular infusion or injection. In some embodiments, the muscle tissue comprises a tibialis anterior tissue, a quadriceps tissue, a soleus tissue, a diaphragm tissue, or a heart tissue. In some embodiments, the composition is administered by an intra-cardiac injection. In some embodiments, the composition is administered systemically. In some embodiments, the composition is administered by an intravenous infusion or injection. In some embodiments, following administration of the composition, the subject exhibits normal dystrophin-positive myofibers, and mosaic dystrophin-positive myofibers containing centralized nuclei, or a combination thereof. In some embodiments, following administration of the composition, the subject exhibits an emergence or an increase in a level of abundance of normal dystrophin-positive myofibers when compared to an absence or a level of abundance of normal dystrophin-positive myofibers prior to administration of the composition. In some embodiments, following administration of the composition, the subject exhibits an emergence or an increase in a level of abundance of mosaic dystrophin-positive myofibers containing centralized nuclei when compared to an absence or an level of abundance of mosaic dystrophin-positive myofibers containing centralized nuclei prior to administration of the composition. In some embodiments, following administration of the composition, the subject exhibits a decreased serum CK level when compared to a serum CK level prior to administration of the composition. In some embodiment, following administration of the composition, the subject exhibits improved grip strength when compared to a grip strength prior to administration of the composition. In some embodiments, the subject is a neonate, an infant, a child, a young adult, or an adult. In some embodiments, the subject has muscular dystrophy. In some embodiments, the subject is a genetic carrier for muscular dystrophy. In some embodiments, the subject is male. In some embodiments, the subject is female. In some embodiments, the subject appears to be asymptomatic and wherein a genetic diagnosis reveals a mutation in one or both copies of a DMD gene that impairs function of the DMD gene product. In some embodiments, the subject presents an early sign or symptom of muscular dystrophy. In some embodiments, the early sign or symptom of muscular dystrophy comprises loss of muscle mass or proximal muscle weakness. In some embodiments, the loss of muscle mass or proximal muscle weakness occurs in one or both leg(s) and/or a pelvis, followed by one or more upper body muscle(s). In some embodiments, the early sign or symptom of muscular dystrophy further comprises pseudohypertrophy, low endurance, difficulty standing, difficulty walking, difficulty ascending a staircase or a combination thereof. In some embodiments, the subject presents a progressive sign or symptom of muscular dystrophy. In some embodiments, the progressive sign or symptom of muscular dystrophy comprises muscle tissue wasting, replacement of muscle tissue with fat, or replacement of muscle tissue with fibrotic tissue. In some embodiments, the subject presents a later sign or symptom of muscular dystrophy. In some embodiments, the later sign or symptom of muscular dystrophy comprises abnormal bone development, curvature of the spine, loss of movement, and paralysis. In some embodiments, the subject presents a neurological sign or symptom of muscular dystrophy. In some embodiments, the neurological sign or symptom of muscular dystrophy comprises intellectual impairment and paralysis. In some embodiments, administration of the composition occurs prior to the subject presenting one or more progressive, later or neurological signs or symptoms of muscular dystrophy. In some embodiments, the subject is less than 10 years old, less than 5 years old, or less than 2 years old.

[0024] Also provided is the use of a therapeutically-effective amount of one or more compositions of the disclosure for treating muscular dystrophy in a subject in need thereof.

[0025] As used herein the specification, “a” or “an” may mean one or more. As used herein in the claim(s), when used in conjunction with the word “comprising”, the words “a” or “an” may mean one or more than one.

[0026] The use of the term “or” in the claims is used to mean “and/or” unless explicitly indicated to refer to alternatives only or the alternatives are mutually exclusive, although the disclosure supports a definition that refers to only alternatives and “and/or.” As used herein “another” may mean at least a second or more.

[0027] Throughout this application, the term “about” is used to indicate that a value includes the inherent variation of error for the device, for the method being employed to determine the value, or that exists among the study subjects. Such an inherent variation may be a variation of ±10% of the stated value.

[0028] Throughout this application, nucleotide sequences are listed in the 5′ to 3′ direction, and amino acid sequences are listed in the N-terminal to C-terminal direction, unless indicated otherwise.

[0029] Other objects, features and advantages of the present invention will become apparent from the following detailed description. It should be understood, however, that the detailed description and the specific examples, while indicating preferred embodiments of the invention, are given by way of illustration only, since various changes and modifications within the spirit and scope of the invention will become apparent to those skilled in the art from this detailed description.

### BRIEF DESCRIPTION OF THE DRAWINGS

[0030] The patent or application file contains at least one drawing executed in color. Copies of this patent or patent application publication with color drawing(s) will be provided by the Office upon request and payment of the necessary fee.

[0031] The following drawings form part of the present specification and are included to further demonstrate certain aspects of the present disclosure. The disclosure may be better understood by reference to one or more of these drawings in combination with the detailed description of specific embodiments presented herein.

[0032] FIGS. 1A-F. “Humanized”-ΔEx50 mouse model. (FIG. 1A) Strategy showing CRISPR/Cas9-mediated genome editing approach to generate a humanized mouse model. (FIG. 1B) RT-PCR analysis to validate deletion of exon 50 (ΔEx50). (FIG. 1C) Sequence of RT-PCR product to validate exon 50 deletion and generation of an out-of-frame sequence (nucleic acid sequence=SEQ ID NO: 1; amino acid sequence=SEQ ID NO: 2). (FIG. 1E) Western blot analysis of dystrophin and vinculin expression in tibialis anterior and heart tissues. (FIG. 1F) Levels of serum CK, a marker of muscle dystrophy that reflects muscle damage and membrane leakage were measured in wildtype (WT), ΔEx50 and mdx mice. (FIG. 1D) Histochemistry of cardiac and skeletal muscle by hematoxylin and eosin (H&E) staining, and immunohistochemistry using dystrophin antibody. Scale bar: 50 μm.

[0033] FIG. 2A-B. Exon 51 skipping. (FIG. 2A) RT-PCR of RNA from ΔEx50 mice 3 weeks after intramuscular injection indicates deletion of exon 51 (termed ΔEx50-51, lower band). (FIG. 2B) Sequence of the RT-PCR products of ΔEx50-51 band confirmed that exon 49 spliced directly to exon 52, excluding exon 51 (nucleic acid sequence=SEQ ID NO: 3; amino acid sequence=SEQ ID NO: 4).

[0034] FIG. 3A-G. Correction of dystrophin expression using triplicate gRNA strategy 3 weeks after intra-muscular injection. (FIG. 3A) Strategy showing CRISPR/Cas9-mediated genome editing approach to correct the reading frame in ΔEx50 mouse model. (FIG. 3B) sgRNA targeting the splice acceptor site (sgRNA-ex51-SA) sequence and schematic illustration of sgRNA binding position. FIG. 3B discloses SEQ ID NOS 954-957, respectively, in order of appearance. (FIG. 3C) Schematic illustration of AAV injection plasmids and strategy. Double guide strategy using rAAV9-sgRNA plasmid for sgRNA-ex51-SA and sgRNA-ex51-SD. Triplicate using rAAV9-sgRNA plasmid containing 3 copies of sgRNA-ex51-SA. Muscle creatine kinase 8 (CK8) promoter to express SpCas9. U6, H1 and 7SK promoter for RNA polymerase III to express sgRNA. (FIG. 3D) Dystrophin immunohistochemistry staining of tibialis anterior muscle. (FIG. 3E) Quantification of dystrophin positive fibers normalized by area. (FIG. 3F) Western blot analysis of dystrophin (DMD) and vinculin (VCL) expression 3 weeks after intramuscular injection. (FIG. 3G) Quantification of dystrophin expression after normalization to vinculin. Data are represented as mean±SEM. **P<0.005. Scale bar: 50 μm

[0035] FIG. 4A-B. Histological improvement of injected muscle after 3 weeks. (FIG. 4A) Histochemistry of tibialis anterior muscle by hematoxylin and eosin (H&E) staining. (FIG. 4B) Quantification of fiber size and percentage of frequency. Data are represented as mean±SEM. Scale bar: 50 μm. Each set of four data points for a given fiber size are Δ50-CTL, WT-CTL, Δ50-AAV-TriSA and Δ50-AAV-SA+SD left to right.

[0036] FIG. 5. Screen of sgRNA in human 293 cells and mouse 10T cells. Undigested PCR products (upper panel) and T7E1 digestion (lower panel) on a 2% agarose gel. M denotes size marker lane. bp indicates the length of the marker bands.

[0037] FIG. 6. Dystrophin immunohistochemistry staining of entire tibialis anterior muscle.

[0038] FIGS. 7A-B. Strategy for CRISPR/Cas9-mediated genome editing in ΔEx50 mice. (FIG. 7A) Strategy showing CRISPR/Cas9-mediated genome editing approach to correct the reading frame in ΔEx50 mouse model. (FIG. 7B) sgRNA targeting the splice acceptor site (sgRNA-ex51-SA2) sequence and schematic illustration of sgRNA binding position. FIG. 7B discloses SEQ ID NOS 958-959, respectively, in order of appearance.

[0039] FIG. 8A-F. sgRNA genomic analysis in mouse and human cells (FIG. 8A) Cas9 was expressed in the presence or absence of mouse sgRNA-sgRNA-51-SA2 in 10T1/2 cells and gene editing was monitored by T7E1 assay in fluorescence-based cell sorted (FACS) (+) and non-sorted cells (−). GFP was used as a control. Undigested PCR products (upper panel) and T7E1 digestion (lower panel) are shown on a 2% agarose gel. Black arrowhead indicates the undigested 771 bp PCR band. Green arrowheads in the lower panel indicate the cut bands by T7E1 assay. M denotes size marker lane. bp indicates the length of the marker bands. (FIG. 8B) Genomic deep sequencing analysis of PCR amplicons generated across the exon 51 target site in 10T1/2 cells. Sequence of representative indels aligned with sgRNA sequence (indicated in blue) revealing insertions (highlighted in green) and deletions (highlighted in red) (SEQ ID NOS 960-966, respectively, in order of appearance). The line indicates the predicted exon splicing enhancers (ESEs) sequence located at the site of sgRNA. Black arrow indicates the cleavage site. (FIG. 8C) Mouse Exon 51 sequence (SEQ ID NO: 967) with the predicted exon splicing enhancers (ESEs) located at the site of sgRNA is indicated in red. Human Exon 51 sequence (SEQ ID NO: 968) with the predicted exon splicing enhancers (ESEs) located at the site of sgRNA is indicated in red. (FIG. 8D) Mouse and human ESE sites of exon 51 predicted using ESEfinder3. (FIG. 8E) Cas9 was expressed in the presence or absence of mouse sgRNA-sgRNA-51-SA2 in 293 T human cells and gene editing was monitored by T7E1 assay in fluorescence-based cell sorted (FACS) (+) and non-sorted cells (−). GFP was used as a control. Undigested PCR products (upper panel) and T7E1 digestion (lower panel) are shown on a 2% agarose gel. Black arrowhead indicates the undigested 771bp PCR band. Green arrowheads in the lower panel indicate the cut bands by T7E1 assay. M denotes size marker lane. bp indicates the length of the marker bands. (FIG. 8F) Sequence of representative indels aligned with sgRNA sequence (indicated in blue) revealing deletions and insertions (SEQ ID NOS 969-978, respectively, in order of appearance). Black arrowhead indicates the cleavage site.

[0040] FIG. 9A-B. Schematic illustration of AAV injection plasmids and strategy. (FIG. 9A) Muscle creatine kinase 8 (CK8) promoter to express SpCas9. (FIG. 9B) Triplicate using rAAV9-sgRNA plasmid containing 3 copies of sgRNA-ex51-SA2. U6, H1 and 7SK promoter for RNA polymerase III to express sgRNA.

[0041] FIG. 10A-B. In vivo Dmd gene editing. (FIG. 10A) Undigested PCR products (upper panel) and T7E1 digestion (lower panel) are shown on a 2% agarose gel of TA (tibialis anterior) muscle samples from WT and ΔEx50 mice 3 weeks after intramuscular injection with AAV9-sgRNA-SA2 and AAV9-Cas9 expression vectors. Controls were injected with only AAV9-Cas9 not AAV9-sgRNA-SA2. Black arrowhead in the upper panel indicates the 771 bp PCR band. Green arrowheads in the lower panel indicate the cut bands by T7E1 assay. M denotes size marker lane. bp indicates the length of the marker bands. N=4. (FIG. 10B) Genomic deep sequencing analysis of PCR amplicons generated across the exon 51 target site in ΔEx50 mice injected with AAV9-sgRNA-51-SA2 and AAV9-Cas9. Sequence of representative indels aligned with sgRNA sequence (indicated in blue) revealing insertions (highlighted in green) and deletions (highlighted in red). (SEQ ID NOS 979-1014, respectively, in order of appearance). Black arrowheads indicate the cleavage site. n=3.

[0042] FIG. 11A-D. RT-PCR analysis of correction of reading frame. (FIG. 11A) RT-PCR of RNA from tibialis anterior muscles of wildtype (WT) and ΔEx50 mice 3 weeks after intramuscular injection of the sgRNA-51-SA2 and Cas9 expression vectors. Lower dystrophin bands indicate deletion of exon 51. Primer positions in exons 48 and 53 are indicated (Fw, Rv). (FIG. 11B) Percentage of events detected at exon 51 after AAV9-sgRNA-51-SA2 treatment using RT-PCR sequence analysis of TOPO-TA generated clones. For each of 4 different samples, we generated and sequenced 40 clones. RT-PCR products were divided into 4 groups: not-edited (NE), exon51-skipped (SK), reframed (RF) and out of frame (OF). (FIG. 11C) Sequence of the RT-PCR products of the ΔEx50-51 mouse dystrophin lower band confirmed that exon 49 spliced directly to exon 52, excluding exon 51. Sequence of RT-PCR products of ΔEx50 reframed (ΔEx50-RF). FIG. 11C discloses SEQ ID NOS 1015-1022, respectively, in order of appearance. (FIG. 11D) Deep sequencing analysis of RT-PCR products from the upper band containing ΔEx50 not-edited (NE) and ΔEx50-RF. Sequence of RT-PCR products revealing insertions (highlighted in green) and deletions (highlighted in red). n=4. Data are represented as mean±SEM. FIG. 11D discloses SEQ ID NOS 1023-1026, respectively, in order appearance.

[0043] FIG. 12A-D. Intramuscular injection of AAV9-Cas9 and AAV9-sgRNA-51-SA2 corrects dystrophin expression. (FIG. 12A) Tibialis anterior muscles of ΔEx50 mice were injected with AAV9 vector encoding sgRNA and Cas9 and analyzed 3 weeks later by immunostaining for dystrophin. Wildtype control (WT-CTL) mice and ΔEx50 mice control (ΔEx50-CTL) were injected with AAV9-Cas9 alone without sgRNAs. Percentages of dystrophin-positive myofibers in ΔEx50-CTL mice and in treated ΔEx50 mice (ΔEx50-AAV9-sgRNA-51-5A2 and AAV9-Cas9) compared to WT-CTL are indicated in each panel. (FIG. 12B) Hematoxylin and eosin (H&E) staining of tibialis anterior muscles. (FIG. 12C) Western blot analysis of dystrophin (DMD) and vinculin (VCL) expression in tibialis anterior muscles 3 weeks after intramuscular injection. (FIG. 12D) Quantification of dystrophin expression from blots after normalization to vinculin. Asterisk indicates non-specific immunoreactive bands. n=5 for AAV9-sgRNA-51-SA2. Scale bar: 50 μm

[0044] FIG. 13. Rescue of dystrophin expression following intramuscular injections of AAV9-Cas9 and AAV9-sgRNA-51-SA2 in ΔEx50 mouse model. Dystrophin immunohistochemistry of entire tibialis anterior muscle. CTL mice were injected with AAV9-Cas9 alone without AAV9-sgRNA-51-SA2. n=5

[0045] FIG. 14. Histological improvement of injected muscle after 3 weeks. Histochemistry of tibialis anterior muscle by hematoxylin and eosin (H&E) staining.

[0046] FIG. 15A-B. Rescue of dystrophin expression following intramuscular injections of AAV9-Cas9 combined with different AAV9s expressing single copy or triple copy of sgRNA in ΔEx50 mouse model. (FIG. 15A) The U6, H1 and 7SK promoters for RNA polymerase III were each individually used to express sgRNA in a single copy (AAV9-U6-sgRNA-51-SA2; AAV9-H1-sgRNA-51-SA2; AAV9-7SK-sgRNA-51-SA2) or triple copy. (FIG. 15B) Dystrophin immunohistochemistry of entire tibialis anterior muscle. Control (CTL) mice were injected with AAV9-Cas9 alone without AAV9-sgRNA-51-SA2.

[0047] FIG. 16A-B. Rescue of dystrophin expression 4 weeks after systemic delivery of AAV9-Cas9 and AAV9-sgRNA-51-SA2 in ΔEx50 mice. (FIG. 16A) Dystrophin immunostaining of tibialis anterior (TA), triceps, diaphragm and cardiac muscles 8 weeks after systemic injection of AAV9-sgRNA-51. (FIG. 16B) Western blot analysis of dystrophin (DMD) and vinculin (VCL) expression in TA, triceps, diaphragm muscles and heart. n=5 for each group. Scale bar: 50 μm.

[0048] FIG. 17A-B. Rescue of dystrophin expression 8 weeks after systemic delivery of AAV9-Cas9 and AAV9-sgRNA-51-SA2 in ΔEx50 mice. (FIG. 17A) Dystrophin immunostaining of tibialis anterior (TA), triceps, diaphragm and cardiac muscles 8 weeks after systemic injection of AAV9-sgRNA-51. (FIG. 17B) Western blot analysis of dystrophin (DMD) and vinculin (VCL) expression in TA, triceps, diaphragm muscles and heart. n=5 for each group. Scale bar: 50 μm.

[0049] FIG. 18A-B. Functional improvement 4 weeks after systemic delivery of AAV9-Cas9 and AAV9-sgRNA-51-SA2 in ΔEx50 mice. (FIG. 18A) Wildtype (WT) mice, control ΔEx50 mice and ΔEx50 mice treated with AAV9-sgRNA-51 (ΔEx50-AAV9-sgRNA-51) were subjected to grip strength testing to measure muscle performance (grams of force). (FIG. 18B) Serum creatine kinase (CK) was measured in WT, ΔEx50 and ΔEx50-AAV9-sgRNA-51 mice. n=5. Asterisk indicates non-specific immunoreactive bands. Data are represented as mean±SEM.

[0050] FIG. 19. Correction of dystrophin expression 6 weeks after intra-muscular injection in ΔEx50-MD Dog. Dystrophin immunohistochemistry staining of cranial tibialis muscle of a wild-type dog (Nathan), a ΔEx50-MD Dog untreated, and two ΔEx50-MD Dogs (Norman and Newton) contralateral uninjected and AAV9-Cas9-sgRNA injected cranial tibialis muscle. Scale bar: 50 μm.

[0051] FIGS. 20A-B. Correction of dystrophin expression 6 weeks after intra-muscular injection in ΔEx50-MD Dog. (FIG. 20A) Western blot analysis of dystrophin (DMD) and vinculin (VCL) of cranial tibialis muscle of a wild-type dog (Nathan), a ΔEx50-MD Dog untreated, and two ΔEx50-MD Dogs (Norman and Newton) contralateral uninjected and AAV9-Cas9-sgRNA injected cranial tibialis muscle. (FIG. 20B) Quantification of dystrophin expression from two independent blots after normalization to vinculin.

[0052] FIG. 21. Histological improvement of injected muscle after 6 weeks in ΔEx50-MD Dog. Histochemistry by hematoxylin and eosin (H&E) staining of cranial tibialis muscle of wild-type dog (Nathan), ΔEx50-MD Dogs (Norman and Newton) contralateral uninjected and AAV9-Cas9-sgRNA injected cranial tibialis muscle. Scale bar: 50 μm.

### DETAILED DESCRIPTION

[0053] DMD is a new mutation syndrome with more than 4,000 independent mutations that have been identified in humans (world-wide web at dmd.n1). The majority of patient mutations include deletions that cluster in a hotspot, and thus a therapeutic approach for skipping certain exon applies to large group of patients. The rationale of the exon skipping approach is based on the genetic difference between DMD and Becker muscular dystrophy (BMD) patients. In DMD patients, the reading frame of dystrophin mRNA is disrupted resulting in prematurely truncated, non-functional dystrophin proteins. BMD patients have mutations in the DMD gene that maintain the reading frame allowing the production of internally deleted, but partially functional dystrophins leading to much milder disease symptoms compared to DMD patients.

[0054] Compositions and methods for treating DMD are provided herein. In some embodiments, an AAV construct is provided, wherein the AAV construct comprises a nucleic acid encoding three promoters that each drive expression of a DMD guide RNA. Using compositions and methods disclosed herein, a more robust and safe form of genome editing was achieved in a humanized mouse model for DMD with a deletion in exon 50, and in a ΔEx50-MD Dog. These and other aspects of the disclosure are reproduced below.

### I. DUCHENNE MUSCULAR DYSTROPHY

[0055] A. Background

[0056] Duchenne muscular dystrophy (DMD) is a recessive X-linked form of muscular dystrophy, affecting around 1 in 5000 boys, which results in muscle degeneration and premature death. The disorder is caused by a mutation in the gene dystrophin (see GenBank Accession NO. NC_000023.11), located on the human X chromosome, which codes for the protein dystrophin (GenBank Accession No. AAA53189; SEQ ID NO: 5), the sequence of which is reproduced below:

| | |
|---|---|
| 1 | mlwweevedc yeredvqkkt ftkwvnaqfs kfgkqhienl fsdlqdgrrl ldllegltgq |
| 61 | klpkekgstr vhalnnvnka lrvlqnnnvd lvnigstdiv dgnhkltlgl iwniilhwqv |
| 121 | knvmknimag lqqtnsekil lswvrqstrn ypqvnvinft tswsdglaln alihshrpdl |
| 181 | fdwnsvvcqq satqrlehaf niaryqlgie klldpedvdt typdkksilm yitslfqvlp |
| 241 | qqvsieaiqe vemlprppkv tkeehfqlhh qmhysqqitv slaqgyerts spkprfksya |
| 301 | ytqaayvtts dptrspfpsq hleapedksf gsslmesevn ldryqtalee vlswllsaed |
| 361 | tlqaqgeisn dvevvkdqfh thegymmdlt ahqgrvgnil qlgskligtg klsedeetev |
| 421 | qeqmnllnsr weclrvasme kqsnlhrvlm dlqnqklkel ndwltkteer trkmeeeplg |
| 481 | pdledlkrqv qqhkvlqedl eqeqvrvnsl thmvvvvdes sgdhataale eqlkvlgdrw |
| 541 | anicrwtedr wvllqdillk wqrlteeqcl fsawlseked avnkihttgf kdqnemlssl |
| 601 | qklavlkadl ekkkqsmgkl yslkqdllst lknksvtqkt eawldnfarc wdnlvqklek |
| 661 | staqisqavt ttqpsltqtt vmetvttvtt reqilvkhaq eelpppppqk krqitvdsei |
| 721 | rkrldvdite lhswitrsea vlqspefaif rkegnfsdlk ekvnaierek aekfrklqda |
| 781 | srsaqalveq mvnegvnads ikqaseqlns rwiefcqlls erlnwleyqn niiafynqlq |
| 841 | qleqmtttae nwlkiqpttp septaiksql kickdevnrl sglqpqierl kiqsialkek |
| 901 | gqgpmfldad fvaftnhfkq vfsdvqarek elqtifdtlp pmryqetmsa irtwvqqset |
| 961 | klsipqlsvt dyeimeqrlg elqalqsslq eqqsglyyls ttvkemskka pseisrkyqs |
| 1021 | efeeiegrwk klssqlvehc qkleeqmnkl rkiqnhiqtl kkwmaevdvf lkeewpalgd |
| 1081 | seilkkqlkq crllvsdiqt iqpslnsvne ggqkikneae pefasrlete lkelntqwdh |
| 1141 | mcqqvyarke alkgglektv slqkdlsemh ewmtqaeeey lerdfeyktp delqkaveem |
| 1201 | krakeeaqqk eakvklltes vnsviaqapp vaqealkkel etlttnyqwl ctrlngkckt |
| 1261 | leevwacwhe llsylekank wlnevefklk ttenipggae eisevldsle nlmrhsednp |
| 1321 | nqirilaqtl tdggvmdeli neeletfnsr wrelheeavr rqklleqsiq saqetekslh |
| 1381 | liqesltfid kqlaayiadk vdaaqmpqea qkiqsdltsh eisleemkkh nqgkeaaqrv |
| 1441 | lsqidvaqkk lqdvsmkfrl fqkpanfelr lqeskmilde vkmhlpalet ksveqevvqs |
| 1501 | qlnhcvnlyk slsevkseve mviktgrqiv qkkqtenpke ldervtalkl hynelgakvt |
| 1561 | erkqqlekcl klsrkmrkem nvltewlaat dmeltkrsav egmpsnldse vawgkatqke |
| 1621 | iekqkvhlks itevgealkt vlgkketlve dklsllnsnw iavtsraeew lnllleyqkh |
| 1681 | metfdqnvdh itkwiiqadt lldesekkkp qqkedvlkrl kaelndirpk vdstrdqaan |
| 1741 | lmanrgdhcr klvepqisel nhrfaaishr iktgkasipl keleqfnsdi qkllepleae |
| 1801 | iqqgvnlkee dfnkdmnedn egtvkellqr gdnlqqritd erkreeikik qqllqtkhna |
| 1861 | lkdlrsqrrk kaleishqwy qykrqaddll kclddiekkl aslpeprder kikeidrelq |
| 1921 | kkkeelnavr rqaeglsedg aamaveptqi qlskrwreie skfaqfrrln faqihtvree |
| 1981 | tmmvmtedmp leisyvpsty lteithvsqa lleveqllna pdlcakdfed lfkqeeslkn |
| 2041 | ikdslqqssg ridiihskkt aalqsatpve rvklqealsq ldfqwekvnk mykdrqgrfd |
| 2101 | rsvekwrrfh ydikifnqwl teaeqflrkt qipenwehak ykwylkelqd gigqrqtvvr |
| 2161 | tlnatgeeii qqssktdasi lqeklgslnl rwqevckqls drkkrleeqk nilsefqrdl |
| 2221 | nefvlwleea dniasiplep gkeqqlkekl eqvkllveel plrqgilkql netggpvlvs |
| 2281 | apispeeqdk lenklkqtnl qwikvsralp ekqgeieaqi kdlgqlekkl edleeqlnhl |
| 2341 | llwlspirnq leiynqpnqe gpfdvqetei avqakqpdve eilskgqhly kekpatqpvk |
| 2401 | rkledlssew kavnrllqel rakqpdlapg lttigasptq tvtlvtqpvv tketaiskle |
| 2461 | mpsslmlevp aladfnrawt eltdwlslld qviksqrvmv gdledinemi ikqkatmqdl |
| 2521 | eqrrpqleel itaaqnlknk tsnqeartii tdrieriqnq wdevqehlqn rrqqlnemlk |
| 2581 | dstqwleake eaeqvlgqar akleswkegp ytvdaiqkki tetkqlakdl rqwqtnvdva |
| 2641 | ndlalkllrd ysaddtrkvh miteninasw rsihkrvser eaaleethrl lqqfpldlek |
| 2701 | flawlteaet tanvlqdatr kerlledskg vkelmkqwqd lqgeieahtd vyhnldensq |
| 2761 | kilrslegsd davllqrrld nmnfkwselr kkslnirshl eassdqwkrl hlslqellvw |
| 2821 | lqlkddelsr qapiggdfpa vqkqndvhra fkrelktkep vimstletvr iflteqpleg |
| 2881 | leklyqepre lppeeraqnv trllrkqaee vnteweklnl hsadwqrkid etlerlqelq |
| 2941 | eatdeldlkl rqaevikgsw qpvgdllids lqdhlekvka lrgeiaplke nvshvndlar |
| 3001 | qlttlgiqls pynlstledl ntrwkllqva vedrvrqlhe ahrdfgpasq hflstsvqgp |
| 3061 | weraispnkv pyyinhetqt tcwdhpkmte lyqsladlnn vrfsayrtam klrrlqkalc |
| 3121 | ldllslsaac daldqhnlkq ndqpmdilqi inclttiydr leqehnnlvn vplcvdmcln |
| 3181 | wllnvydtgr tgrirvlsfk tgiislckah ledkyrylfk qvasstgfcd qrrlglllhd |
| 3241 | siqiprqlge vasfggsnie psvrscfqfa nnkpeieaal fldwmrlepq smvwlpvlhr |
| 3301 | vaaaetakhq akcnickecp iigfryrslk hfnydicqsc ffsgrvakgh kmhypmveyc |
| 3361 | tpttsgedvr dfakvlknkf rtkryfakhp rmgylpvqtv legdnmetpv tlinfwpvds |
| 3421 | apasspqlsh ddthsriehy asrlaemens ngsylndsis pnesiddehl liqhycqsln |
| 3481 | qdsplsqprs paqilisles eergeleril adleeenrnl qaeydrlkqq hehkglsplp |
| 3541 | sppemmptsp qsprdaelia eakllrqhkg rlearmqile dhnkqlesql hrlrqlleqp |
| 3601 | qaeakvngtt vsspstslqr sdssqpmllr vvgsqtsdsm geedllsppq dtstgleevm |
| 3661 | eqlnnsfpss rgrntpgkpm redtm. |

[0057] In humans, dystrophin mRNA contains 79 exons. Dystrophin mRNA is known to be alternatively spliced, resulting in various isoforms. Exemplary dystrophin isoforms are listed in Table 1.

TABLE 1
Dystrophin isoforms

| | | Nucleic Acid | | Protein | |
|---|---|---|---|---|---|
| Sequence | Nucleic Acid | SEQ ID | Protein | SEQ ID | |
| Name | Accession No. | NO: | Accession No. | NO: | Description |
| DMD | NC_000023.11 | None | None | None | Sequence from |
| Genomic | (positions | | | | Human X |
| Sequence | 31119219 to | | | | Chromosome (at |
| | 33339609) | | | | positions Xp21.2 to |
| | | | | | p21.1) from |
| | | | | | Assembly |
| | | | | | GRCh38.p7 |
| | | | | | (GCF_000001405.33) |
| Dystrophin | NM_000109.3 | 6 | NP_000100.2 | 7 | Transcript Variant: |
| Dp427c | | | | | transcript Dp427c is |
| isoform | | | | | expressed |
| | | | | | predominantly in |
| | | | | | neurons of the cortex |
| | | | | | and the CA regions |
| | | | | | of the hippocampus. |
| | | | | | It uses a unique |
| | | | | | promoter/exon 1 |
| | | | | | located about 130 kb |
| | | | | | upstream of the |
| | | | | | Dp427m transcript |
| | | | | | promoter. The |
| | | | | | transcript includes |
| | | | | | the common exon 2 |
| | | | | | of transcript Dp427m |
| | | | | | and has a similar |
| | | | | | length of 14 kb. The |
| | | | | | Dp427c isoform |
| | | | | | contains a unique N- |
| | | | | | terminal MED |
| | | | | | sequence, instead of |
| | | | | | the |
| | | | | | MLWWEEVEDCY |
| | | | | | sequence (SEQ ID |
| | | | | | NO: 949) of isoform |
| | | | | | Dp427m. The |
| | | | | | remainder of isoform |
| | | | | | Dp427c is identical |
| | | | | | to isoform Dp427m. |
| Dystrophin | NM_004006.2 | 8 | NP_003997.1 | 9 | Transcript Variant: |
| Dp427m | | | | | transcript Dp427m |
| isoform | | | | | encodes the main |
| | | | | | dystrophin protein |
| | | | | | found in muscle. As |
| | | | | | a result of alternative |
| | | | | | promoter use, exon 1 |
| | | | | | encodes a unique N- |
| | | | | | terminal |
| | | | | | MLWWEEVEDCY |
| | | | | | (SEQ ID NO: 949) |
| | | | | | aa sequence. |
| Dystrophin | NM_004009.3 | 10 | NP_004000.1 | 11 | Transcript Variant: |
| Dp427pl | | | | | transcript Dp427p1 |
| isoform | | | | | initiates from a |
| | | | | | unique |
| | | | | | promoter/exon 1 |
| | | | | | located in what |
| | | | | | corresponds to the |
| | | | | | first intron of |
| | | | | | transcript Dp427m. |
| | | | | | The transcript adds |
| | | | | | the common exon 2 |
| | | | | | of Dp427m and has a |
| | | | | | similar length (14 |
| | | | | | kb). The Dp427p1 |
| | | | | | isoform replaces the |
| | | | | | MLWWEEVEDCY |
| | | | | | (SEQ ID NO: 949) - |
| | | | | | start of Dp427m with |
| | | | | | a unique N-terminal |
| | | | | | MSEVSSD (SEQ ID |
| | | | | | NO: 950) aa |
| | | | | | sequence. |
| Dystrophin | NM_004011.3 | 12 | NP_004002.2 | 13 | Transcript Variant: |
| Dp260-1 | | | | | transcript Dp260-1 |
| isoform | | | | | uses exons 30-79, |
| | | | | | and originates from a |
| | | | | | promoter/exon 1 |
| | | | | | sequence located in |
| | | | | | intron 29 of the |
| | | | | | dystrophin gene. As |
| | | | | | a result, Dp260-1 |
| | | | | | contains a 95 bp |
| | | | | | exon 1 encoding a |
| | | | | | unique N-terminal 16 |
| | | | | | aa |
| | | | | | MTEIILLIFFPAYFL |
| | | | | | N-sequence (SEQ ID |
| | | | | | NO: 951) that |
| | | | | | replaces amino acids |
| | | | | | 1-1357 of the full- |
| | | | | | length dystrophin |
| | | | | | product (Dp427m |
| | | | | | isoform). |
| Dystrophin | NM_004012.3 | 14 | NP_004003.1 | 15 | Transcript Variant: |
| Dp260-2 | | | | | transcript Dp260-2 |
| isoform | | | | | uses exons 30-79, |
| | | | | | starting from a |
| | | | | | promoter/exon 1 |
| | | | | | sequence located in |
| | | | | | intron 29 of the |
| | | | | | dystrophin gene that |
| | | | | | is alternatively |
| | | | | | spliced and lacks N- |
| | | | | | terminal amino acids |
| | | | | | 1-1357 of the full |
| | | | | | length dystrophin |
| | | | | | (Dp427m isoform). |
| | | | | | The Dp260-2 |
| | | | | | transcript encodes a |
| | | | | | unique N-terminal |
| | | | | | MSARKLRNLSYKK |
| | | | | | sequence (SEQ ID |
| | | | | | NO: 952). |
| Dystrophin | NM_004013.2 | 16 | NP_004004.1 | 17 | Transcript Variant: |
| Dp140 | | | | | Dp140 transcripts |
| isoform | | | | | use exons 45-79, |
| | | | | | starting at a |
| | | | | | promoter/exon 1 |
| | | | | | located in intron 44. |
| | | | | | Dp140 transcripts |
| | | | | | have a long (1 kb) 5′ |
| | | | | | UTR since |
| | | | | | translation is initiated |
| | | | | | in exon 51 |
| | | | | | (corresponding to aa |
| | | | | | 2461 of dystrophin). |
| | | | | | In addition to the |
| | | | | | alternative promoter |
| | | | | | and exon 1, |
| | | | | | differential splicing |
| | | | | | of exons 71-74 and |
| | | | | | 78 produces at least |
| | | | | | five Dp140 isoforms. |
| | | | | | Of these, this |
| | | | | | transcript (Dp140) |
| | | | | | contains all of the |
| | | | | | exons. |
| Dystrophin | NM_004014.2 | 18 | NP_004005.1 | 19 | Transcript Variant: |
| Dp116 | | | | | transcript Dp116 |
| isoform | | | | | uses exons 56-79, |
| | | | | | starting from a |
| | | | | | promoter/exon 1 |
| | | | | | within intron 55. As |
| | | | | | a result, the Dp116 |
| | | | | | isoform contains a |
| | | | | | unique N-terminal |
| | | | | | MLHRKTYHVK aa |
| | | | | | sequence (SEQ ID |
| | | | | | NO: 953), instead of |
| | | | | | aa 1-2739 of |
| | | | | | dystrophin. |
| | | | | | Differential splicing |
| | | | | | produces several |
| | | | | | Dp116-subtypes. The |
| | | | | | Dp116 isoform is |
| | | | | | also known as S- |
| | | | | | dystrophin or apo- |
| | | | | | dystrophin-2. |
| Dystrophin | NM_004015.2 | 20 | NP_004006.1 | 21 | Transcript Variant: |
| Dp71 | | | | | Dp71 transcripts use |
| isoform | | | | | exons 63-79 with a |
| | | | | | novel 80- to 100-nt |
| | | | | | exon containing an |
| | | | | | ATG start site for a |
| | | | | | new coding sequence |
| | | | | | of 17 nt. The short |
| | | | | | coding sequence is |
| | | | | | in-frame with the |
| | | | | | consecutive |
| | | | | | dystrophin sequence |
| | | | | | from exon 63. |
| | | | | | Differential splicing |
| | | | | | of exons 71 and 78 |
| | | | | | produces at least four |
| | | | | | Dp71 isoforms. Of |
| | | | | | these, this transcript |
| | | | | | (Dp71) includes both |
| | | | | | exons 71 and 78. |
| Dystrophin | NM_004016.2 | 22 | NP_004007.1 | 23 | Transcript Variant: |
| Dp71b | | | | | Dp71 transcripts use |
| isoform | | | | | exons 63-79 with a |
| | | | | | novel 80- to 100-nt |
| | | | | | exon containing an |
| | | | | | ATG start site for a |
| | | | | | new coding sequence |
| | | | | | of 17 nt. The short |
| | | | | | coding sequence is |
| | | | | | in-frame with the |
| | | | | | consecutive |
| | | | | | dystrophin sequence |
| | | | | | from exon 63. |
| | | | | | Differential splicing |
| | | | | | of exons 71 and 78 |
| | | | | | produces at least four |
| | | | | | Dp71 isoforms. Of |
| | | | | | these, this transcript |
| | | | | | (Dp71b) lacks exon |
| | | | | | 78 and encodes a |
| | | | | | protein with a |
| | | | | | different C-terminus |
| | | | | | than Dp71 and |
| | | | | | Dp71a isoforms. |
| Dystrophin | NM_004017.2 | 24 | NP_004008.1 | 25 | Transcript Variant: |
| Dp71a | | | | | Dp71 transcripts use |
| isoform | | | | | exons 63-79 with a |
| | | | | | novel 80- to 100-nt |
| | | | | | exon containing an |
| | | | | | ATG start site for a |
| | | | | | new coding sequence |
| | | | | | of 17 nt. The short |
| | | | | | coding sequence is |
| | | | | | in-frame with the |
| | | | | | consecutive |
| | | | | | dystrophin sequence |
| | | | | | from exon 63. |
| | | | | | Differential splicing |
| | | | | | of exons 71 and 78 |
| | | | | | produces at least four |
| | | | | | Dp71 isoforms. Of |
| | | | | | these, this transcript |
| | | | | | (Dp71a) lacks exon |
| | | | | | 71. |
| Dystrophin | NM_004018.2 | 26 | NP_004009.1 | 27 | Transcript Variant: |
| Dp71ab | | | | | Dp71 transcripts use |
| isoform | | | | | exons 63-79 with a |
| | | | | | novel 80- to 100-nt |
| | | | | | exon containing an |
| | | | | | ATG start site for a |
| | | | | | new coding sequence |
| | | | | | of 17 nt. The short |
| | | | | | coding sequence is |
| | | | | | in-frame with the |
| | | | | | consecutive |
| | | | | | dystrophin sequence |
| | | | | | from exon 63. |
| | | | | | Differential splicing |
| | | | | | of exons 71 and 78 |
| | | | | | produces at least four |
| | | | | | Dp71 isoforms. Of |
| | | | | | these, this transcript |
| | | | | | (Dp71ab) lacks both |
| | | | | | exons 71 and 78 and |
| | | | | | encodes a protein |
| | | | | | with a C-terminus |
| | | | | | like isoform Dp71b. |
| Dystrophin | NM_004019.2 | 28 | NP_004010.1 | 29 | Transcript Variant: |
| Dp40 | | | | | transcript Dp40 uses |
| isoform | | | | | exons 63-70. The 5′ |
| | | | | | UTR and encoded |
| | | | | | first 7 aa are identical |
| | | | | | to that in transcript |
| | | | | | Dp71, but the stop |
| | | | | | codon lies at the |
| | | | | | splice junction of the |
| | | | | | exon/intron 70. The |
| | | | | | 3′ UTR includes nt |
| | | | | | from intron 70 which |
| | | | | | includes an |
| | | | | | alternative |
| | | | | | polyadenylation site. |
| | | | | | The Dp40 isoform |
| | | | | | lacks the normal C- |
| | | | | | terminal end of full- |
| | | | | | length dystrophin (aa |
| | | | | | 3409-3685). |
| Dystrophin | NM_004020.3 | 30 | NP_004011.2 | 31 | Transcript Variant: |
| Dp140c | | | | | Dp140 transcripts |
| isoform | | | | | use exons 45-79, |
| | | | | | starting at a |
| | | | | | promoter/exon 1 |
| | | | | | located in intron 44. |
| | | | | | Dp140 transcripts |
| | | | | | have along (1 kb) 5′ |
| | | | | | UTR since |
| | | | | | translation is initiated |
| | | | | | in exon 51 |
| | | | | | (corresponding to aa |
| | | | | | 2461 of dystrophin). |
| | | | | | In addition to the |
| | | | | | alternative promoter |
| | | | | | and exon 1, |
| | | | | | differential splicing |
| | | | | | of exons 71-74 and |
| | | | | | 78 produces at least |
| | | | | | five Dp140 isoforms. |
| | | | | | Of these, this |
| | | | | | transcript (Dp140c) |
| | | | | | lacks exons 71-74. |
| Dystrophin | NM_004021.2 | 32 | NP_004012.1 | 33 | Transcript Variant: |
| Dp140b | | | | | Dp140 transcripts |
| isoform | | | | | use exons 45-79, |
| | | | | | starting at a |
| | | | | | promoter/exon 1 |
| | | | | | located in intron 44. |
| | | | | | Dp140 transcripts |
| | | | | | have along (1 kb) 5′ |
| | | | | | UTR since |
| | | | | | translation is initiated |
| | | | | | in exon 51 |
| | | | | | (corresponding to aa |
| | | | | | 2461 of dystrophin). |
| | | | | | In addition to the |
| | | | | | alternative promoter |
| | | | | | and exon 1, |
| | | | | | differential splicing |
| | | | | | of exons 71-74 and |
| | | | | | 78 produces at least |
| | | | | | five Dp140 isoforms. |
| | | | | | Of these, this |
| | | | | | transcript (Dp140b) |
| | | | | | lacks exon 78 and |
| | | | | | encodes a protein |
| | | | | | with a unique C- |
| | | | | | terminus. |
| Dystrophin | NM_004022.2 | 34 | NP_004013.1 | 35 | Transcript Variant: |
| Dp140ab | | | | | Dp140 transcripts |
| isoform | | | | | use exons 45-79, |
| | | | | | starting at a |
| | | | | | promoter/exon 1 |
| | | | | | located in intron 44. |
| | | | | | Dp140 transcripts |
| | | | | | have along (1 kb) 5′ |
| | | | | | UTR since |
| | | | | | translation is initiated |
| | | | | | in exon 51 |
| | | | | | (corresponding to aa |
| | | | | | 2461 of dystrophin). |
| | | | | | In addition to the |
| | | | | | alternative promoter |
| | | | | | and exon 1, |
| | | | | | differential splicing |
| | | | | | of exons 71-74 and |
| | | | | | 78 produces at least |
| | | | | | five Dp140 isoforms. |
| | | | | | Of these, this |
| | | | | | transcript (Dp140ab) |
| | | | | | lacks exons 71 and |
| | | | | | 78 and encodes a |
| | | | | | protein with a unique |
| | | | | | C-terminus. |
| Dystrophin | NM_004023.2 | 36 | NP_004014.1 | 37 | Transcript Variant: |
| Dp140bc | | | | | Dp140 transcripts |
| isoform | | | | | use exons 45-79, |
| | | | | | starting at a |
| | | | | | promoter/exon 1 |
| | | | | | located in intron 44. |
| | | | | | Dp140 transcripts |
| | | | | | have along (1 kb) 5′ |
| | | | | | UTR since |
| | | | | | translation is initiated |
| | | | | | in exon 51 |
| | | | | | (corresponding to aa |
| | | | | | 2461 of dystrophin). |
| | | | | | In addition to the |
| | | | | | alternative promoter |
| | | | | | and exon 1, |
| | | | | | differential splicing |
| | | | | | of exons 71-74 and |
| | | | | | 78 produces at least |
| | | | | | five Dp140 isoforms. |
| | | | | | Of these, this |
| | | | | | transcript (Dp140bc) |
| | | | | | lacks exons 71-74 |
| | | | | | and 78 and encodes a |
| | | | | | protein with a unique |
| | | | | | C-terminus. |
| Dystrophin | XM_006724469.3 | 38 | XP_006724532.1 | 39 | |
| isoform | | | | | |
| X2 | | | | | |
| Dystrophin | XM_011545467.1 | 40 | XP_011543769.1 | 41 | |
| isoform | | | | | |
| X5 | | | | | |
| Dystrophin | XM_006724473.2 | 42 | XP_006724536.1 | 43 | |
| isoform | | | | | |
| X6 | | | | | |
| Dystrophin | XM_006724475.2 | 44 | XP_006724538.1 | 45 | |
| isoform | | | | | |
| X8 | | | | | |
| Dystrophin | XM_017029328.1 | 46 | XP_016884817.1 | 47 | |
| isoform | | | | | |
| X4 | | | | | |
| Dystrophin | XM_006724468.2 | 48 | XP_006724531.1 | 49 | |
| isoform | | | | | |
| X1 | | | | | |
| Dystrophin | XM_017029331.1 | 50 | XP_016884820.1 | 51 | |
| isoform | | | | | |
| X13 | | | | | |
| Dystrophin | XM_006724470.3 | 52 | XP_006724533.1 | 53 | |
| isoform | | | | | |
| X3 | | | | | |
| Dystrophin | XM_006724474.3 | 54 | XP_006724537.1 | 55 | |
| isoform | | | | | |
| X7 | | | | | |
| Dystrophin | XM_011545468.2 | 56 | XP_011543770.1 | 57 | |
| isoform | | | | | |
| X9 | | | | | |
| Dystrophin | XM_017029330.1 | 58 | XP_016884819.1 | 59 | |
| isoform | | | | | |
| X11 | | | | | |
| Dystrophin | XM_017029329.1 | 865 | XP_016884818.1 | 866 | |
| isoform | | | | | |
| X10 | | | | | |
| Dystrophin | XM_011545469.1 | 867 | XP_011543771.1 | 868 | |
| isoform | | | | | |
| X12 | | | | | |

[0058] The murine dystrophin protein has the following amino acid sequence (Uniprot Accession No. P11531, SEQ. ID. NO: 869):

| | |
|---|---|
| 1 | MWWVDCYRDV KKTTKWNASK GKHDNSDDGK RDGTGKKKGS |
| | TRVHANNVNK ARVKNNVDVN |
| 61 | GSTDVDGNHK TGWNHWVKNV MKTMAGTNSK SWVRSTRNYV |
| | NVNTSSWSDG ANAHSHRDDW |
| 121 | NSVVSHSATR HANAKCGKDD VATTYDKKSM YTSVVSAVMR |
| | TSSKVTRHHH MHYSTVSAGY |
| 181 | TSSSKRKSYA TAAYVATSDS TSYSHARDKS DSSMTVNDSY |
| | TAVSWSADTR AGSNDVVKHA |
| 241 | HGMMDTSHGV GNVGSVGKGK SDAVMNNSRW CRVASMKSKH |
| | KVMDNKKDDW TKTRTKKMGD |
| 301 | DKCVHKVDVR VNSTHMVVVV DSSGDHATAA KVGDRWANCR |
| | WTDRWVDKWH TCSTWSKDAM |
| 361 | KNTSGKDNMM SSHKSTKDKK KTMKSSNDSA KNKSVTKMWM |
| | NARWDNTKKS SASAVTTTST |
| 421 | TTVMTVTMVT TRMVKHAKKR TVDSRKRDVD THSWTRSAVS |
| | SAVYRKGNSD KVNAARKAKR |
| 481 | KDASRSAAVM ANGVNASRAS NSRWTCSRVN WYTNTYNMTT |
| | TANKTSTTST AKSKCKDVNR |
| 541 | SAKSKKGGMD ADVATNHNHD GVRAKKTDTM RYTMSSRTWS |
| | SKSVYSVTYM RGKASSKNGN |
| 601 | YSDTVKMAKK ASCKYSGHWK KSSVSCKHMN KRKNHKTKWM |
| | AVDVKWAGDA KKKCRVGDTS |
| 661 | NSVNGGKKSA ASRTRNTWDH CRVYTRKAKA GDKTVSKDSM |
| | HWMTAYRDYK TDTAVMKRAK |
| 721 | AKTKVKTTVN SVAHASAAKK TTTNYWCTRN GKCKTVWACW |
| | HSYKANKWNV KKTMNVAGTV |
| 781 | SNMHHSNNRA TTDGGVMDNT NSRWRHAVRK KSSAKSHSDK |
| | AAYTDKVDAA MAKSDTSHSM |
| 841 | KKHNGKDANR VSDVAKKDVS MKRKANRSKM DVKMHATKSV |
| | VSSHCVNYKS SVKSVMVKTG |
| 901 | RVKKTNKDRV TAKHYNGAKV TRKKCKSRKM RKMNVTWAAT |
| | DTTKRSAVGM SNDSVAWGKA |
| 961 | TKKKAHKSVT GSKMVGKKTV DKSNSNWAVT SRVWNYKHMT |
| | DNTKWHADDS KKKKDKRKAM |
| 1021 | NDMRKVDSTR DAAKMANRGD HCRKVVSNRR AASHRKTGKA |
| | SKNSDKAGVN KDNKDMSDNG |
| 1081 | TVNRGDNRTD RKRKKTKHNA KDRSRRKKAS HWYYKRADDK |
| | CDKKASRDRK KDRKKKNAVR |
| 1141 | RAGSNGAAMA VTSKRWRSNA RRNAHTHTMV VTTDMDVSYV |
| | STYTSHASVD HNTCAKDDKS |
| 1201 | KNKDNSGRDH KKKTAASATS MKVKVAVAMD GKHRMYKRGR |
| | DRSVKWRHHY DMKVNWNVKK |
| 1261 | TNNWHAKYKW YKDGGRAVVR TNATGSSKTD VNKGSSRWHD |
| | CKARRKRKNV SRDNVWADNA |
| 1321 | TGDKVKARGK NTGGAVVSAR DKKKKTNWKV SRAKGVHKDR |
| | DHWSRNYNSA GDKVTVHGKA |
| 1381 | DVRSKGHYKK STVKRKDRSW AVNHRRTKDR AGSTTGASAS |
| | TVTVTSVVTK TVSKMSSVAA |
| 1441 | DNRAWTTDWS DRVKSRVMVG DDNMKKATDR RTAANKNKTS |
| | NARTTDRRWD VNRRNMKDST |
| 1501 | WAKAVGVRGK DSWKGHTVDA KKTTKAKDRR SVDVANDAKR |
| | DYSADDTRKV HMTNNTSWGN |
| 1561 | HKRVSAATHR DKSWTATTAN VDASRKKDSR GVRMKWDGTH |
| | TDYHNDNGKR SGSDARRDNM |
| 1621 | NKWSKKSNRS HASSDWKRHS VWKDDSRAGG DAVKNDHRAK |
| | RKTKVMSTTV RTGKYRRANV |
| 1681 | TRRKAVNAWD KNRSADWRKD ARAADDKRAV KGSWVGDDSD |
| | HKVKARGAKN VNRVNDAHTT |
| 1741 | GSYNSTDNTR WRVAVDRVRH AHRDGASHST SVGWRASNKV |
| | YYNHTTTCWD HKMTYSADNN |
| 1801 | VRSAYRTAMK RRKACDSSAA CDADHNKNDM DNCTTYDRHN |
| | NVNVCVDMCN WNVYDTGRTG |
| 1861 | RRVSKTGSCK AHDKYRYKVA SSTGCDRRGH DSRGVASGGS |
| | NSVRSCANNK AADWMRSMVW |
| 1921 | VHRVAAATAK HAKCNCKCGR YRSKHNYDCS CSGRVAKGHK |
| | MHYMVYCTTT SGDVRDAKVK |
| 1981 | NKRTKRYAKH RMGYVTVGDN MTVTNWVDSA ASSSHDDTHS |
| | RHYASRAMNS NGSYNDSSNS |
| 2041 | DDHHYCSNDS SRSASSRGRA DNRNAYDRKH HKGSSMMTSS |
| | RDAAAKRHKG RARMDHNKSH |
| 2101 | RRAAKVNGTT VSSSTSRSDS SMRVVGSTSS MGDSDTSTGV |
| | MNNSSSRGRN AGKMRDTM |

[0059] Dystrophin is an important component within muscle tissue that provides structural stability to the dystroglycan complex (DGC) of the cell membrane. While both sexes can carry the mutation, females are rarely affected with the skeletal muscle form of the disease.

[0060] Mutations vary in nature and frequency. Large genetic deletions are found in about 60-70% of cases, large duplications are found in about 10% of cases, and point mutants or other small changes account for about 15-30% of cases. Bladen et al. (2015), who examined some 7000 mutations, catalogued a total of 5,682 large mutations (80% of total mutations), of which 4,894 (86%) were deletions (1 exon or larger) and 784 (14%) were duplications (1 exon or larger). There were 1,445 small mutations (smaller than 1 exon, 20% of all mutations), of which 358 (25%) were small deletions and 132 (9%) small insertions, while 199 (14%) affected the splice sites. Point mutations totaled 756 (52% of small mutations) with 726 (50%) nonsense mutations and 30 (2%) missense mutations. Finally, 22 (0.3%) mid-intronic mutations were observed. In addition, mutations were identified within the database that would potentially benefit from novel genetic therapies for DMD including stop codon read-through therapies (10% of total mutations) and exon skipping therapy (80% of deletions and 55% of total mutations).

[0061] B. Symptoms

[0062] Symptoms usually appear in boys between the ages of 2 and 3 and may be visible in early infancy. Even though symptoms do not appear until early infancy, laboratory testing can identify children who carry the active mutation at birth. Progressive proximal muscle weakness of the legs and pelvis associated with loss of muscle mass is observed first. Eventually this weakness spreads to the arms, neck, and other areas. Early signs may include pseudohypertrophy (enlargement of calf and deltoid muscles), low endurance, and difficulties in standing unaided or inability to ascend staircases. As the condition progresses, muscle tissue experiences wasting and is eventually replaced by fat and fibrotic tissue (fibrosis). By age 10, braces may be required to aid in walking but most patients are wheelchair dependent by age 12. Later symptoms may include abnormal bone development that lead to skeletal deformities, including curvature of the spine. Due to progressive deterioration of muscle, loss of movement occurs, eventually leading to paralysis. Intellectual impairment may or may not be present but if present, does not progressively worsen as the child ages. The average life expectancy for males afflicted with DMD is around 25.

[0063] The main symptom of Duchenne muscular dystrophy, a progressive neuromuscular disorder, is muscle weakness associated with muscle wasting with the voluntary muscles being first affected, especially those of the hips, pelvic area, thighs, shoulders, and calves. Muscle weakness also occurs later, in the arms, neck, and other areas. Calves are often enlarged. Symptoms usually appear before age 6 and may appear in early infancy. Other physical symptoms are:
[0064] 1. Awkward manner of walking, stepping, or running—(patients tend to walk on their forefeet, because of an increased calf muscle tone. Also, toe walking is a compensatory adaptation to knee extensor weakness.)
[0065] 2. Frequent falls.
[0066] 3. Fatigue.
[0067] 4. Difficulty with motor skills (running, hopping, jumping).
[0068] 5. Lumbar hyperlordosis, possibly leading to shortening of the hip-flexor muscles. This has an effect on overall posture and a manner of walking, stepping, or running.
[0069] 6. Muscle contractures of Achilles tendon and hamstrings impair functionality because the muscle fibers shorten and fibrose in connective tissue.
[0070] 7. Progressive difficulty walking.
[0071] 8. Muscle fiber deformities.
[0072] 9. Pseudohypertrophy (enlarging) of tongue and calf muscles. The muscle tissue is eventually replaced by fat and connective tissue, hence the term pseudohypertrophy.
[0073] 10. Higher risk of neurobehavioral disorders (e.g., ADHD), learning disorders (dyslexia), and non-progressive weaknesses in specific cognitive skills (in particular short-term verbal memory), which are believed to be the result of absent or dysfunctional dystrophin in the brain.
[0074] 11. Eventual loss of ability to walk (usually by the age of 12).
[0075] 12. Skeletal deformities (including scoliosis in some cases).
[0076] 13. Trouble getting up from lying or sitting position.
   The condition can often be observed clinically from the moment the patient takes his first steps, and the ability to walk usually completely disintegrates between the time the boy is 9 to 12 years of age. Most men affected with DMD become essentially “paralyzed from the neck down” by the age of 21. Muscle wasting begins in the legs and pelvis, then progresses to the muscles of the shoulders and neck, followed by loss of arm muscles and respiratory muscles. Calf muscle enlargement (pseudohypertrophy) is quite obvious. Cardiomyopathy particularly (dilated cardiomyopathy) is common, but the development of congestive heart failure or arrhythmia (irregular heartbeat) is only occasional.

[0077] A positive Gowers' sign reflects the more severe impairment of the lower extremities muscles. The child helps himself to get up with upper extremities: first by rising to stand on his arms and knees, and then “walking” his hands up his legs to stand upright. Affected children usually tire more easily and have less overall strength than their peers. Creatine kinase (CPK-MM) levels in the bloodstream are extremely high. An electromyography (EMG) shows that weakness is caused by destruction of muscle tissue rather than by damage to nerves. Genetic testing can reveal genetic errors in the Xp21 gene. A muscle biopsy (immunohistochemistry or immunoblotting) or genetic test (blood test) confirms the absence of dystrophin, although improvements in genetic testing often make this unnecessary.

[0078] DMD patients may suffer from:
[0079] 1. Abnormal heart muscle (cardiomyopathy).
[0080] 2. Congestive heart failure or irregular heart rhythm (arrhythmia).
[0081] 3. Deformities of the chest and back (scoliosis).
[0082] 4. Enlarged muscles of the calves, buttocks, and shoulders (around age 4 or 5). These muscles are eventually replaced by fat and connective tissue (pseudohypertrophy).
[0083] 5. Loss of muscle mass (atrophy).
[0084] 6. Muscle contractures in the heels, legs.
[0085] 7. Muscle deformities.
[0086] 8. Respiratory disorders, including pneumonia and swallowing with food or fluid passing into the lungs (in late stages of the disease).

[0087] C. Causes

[0088] Duchenne muscular dystrophy (DMD) is caused by a mutation of the dystrophin gene at locus Xp21, located on the short arm of the X chromosome. Dystrophin is responsible for connecting the cytoskeleton of each muscle fiber to the underlying basal lamina (extracellular matrix), through a protein complex containing many subunits. The absence of dystrophin permits excess calcium to penetrate the sarcolemma (the cell membrane). Alterations in calcium and signaling pathways cause water to enter into the mitochondria, which then burst.

[0089] In skeletal muscle dystrophy, mitochondrial dysfunction gives rise to an amplification of stress-induced cytosolic calcium signals and an amplification of stress-induced reactive-oxygen species (ROS) production. In a complex cascading process that involves several pathways and is not clearly understood, increased oxidative stress within the cell damages the sarcolemma and eventually results in the death of the cell. Muscle fibers undergo necrosis and are ultimately replaced with adipose and connective tissue.

[0090] DMD is inherited in an X-linked recessive pattern. Females will typically be carriers for the disease while males will be affected. Typically, a female carrier will be unaware they carry a mutation until they have an affected son. The son of a carrier mother has a 50% chance of inheriting the defective gene from his mother. The daughter of a carrier mother has a 50% chance of being a carrier and a 50% chance of having two normal copies of the gene. In all cases, an unaffected father will either pass a normal Y to his son or a normal X to his daughter. Female carriers of an X-linked recessive condition, such as DMD, can show symptoms depending on their pattern of X-inactivation.

[0091] Exon deletions preceding exon 51 of the human DMD gene, which disrupt the open reading frame (ORF) by juxtaposing out of frame exons, represent the most common type of human DMD mutation. Skipping of exon 51 can, in principle, restore the DMD ORF in 13% of DMD patients with exon deletions.

[0092] Duchenne muscular dystrophy has an incidence of 1 in 5000 male infants. Mutations within the dystrophin gene can either be inherited or occur spontaneously during germline transmission. A table of exemplary but non-limiting mutations and corresponding models are set forth below:

TABLE 2
Dystrophin mutations and corresponding mouse models

| Deletion, small insertion and | Name of |
|---|---|
| nonsense mutations | Mouse Model |
| Exon 44 | ΔEx44 |
| Exon 52 | ΔEx52 |
| Exon 43 | ΔEx43 |

[0093] D. Diagnosis

[0094] Genetic counseling is advised for people with a family history of the disorder. Duchenne muscular dystrophy can be detected with about 95% accuracy by genetic studies performed during pregnancy.

[0095] DNA test. The muscle-specific isoform of the dystrophin gene is composed of 79 exons, and DNA testing and analysis can usually identify the specific type of mutation of the exon or exons that are affected. DNA testing confirms the diagnosis in most cases.

[0096] Muscle biopsy. If DNA testing fails to find the mutation, a muscle biopsy test may be performed. A small sample of muscle tissue is extracted (usually with a scalpel instead of a needle) and a dye is applied that reveals the presence of dystrophin. Complete absence of the protein indicates the condition.

[0097] Over the past several years DNA tests have been developed that detect more of the many mutations that cause the condition, and muscle biopsy is not required as often to confirm the presence of Duchenne's.

[0098] Prenatal tests. DMD is carried by an X-linked recessive gene. Males have only one X chromosome, so one copy of the mutated gene will cause DMD. Fathers cannot pass X-linked traits on to their sons, so the mutation is transmitted by the mother.

[0099] If the mother is a carrier, and therefore one of her two X chromosomes has a DMD mutation, there is a 50% chance that a female child will inherit that mutation as one of her two X chromosomes, and be a carrier. There is a 50% chance that a male child will inherit that mutation as his one X chromosome, and therefore have DMD.

[0100] Prenatal tests can tell whether their unborn child has the most common mutations. There are many mutations responsible for DMD, and some have not been identified, so genetic testing only works when family members with DMD have a mutation that has been identified.

[0101] Prior to invasive testing, determination of the fetal sex is important; while males are sometimes affected by this X-linked disease, female DMD is extremely rare. This can be achieved by ultrasound scan at 16 weeks or more recently by free fetal DNA testing. Chorion villus sampling (CVS) can be done at 11-14 weeks, and has a 1% risk of miscarriage. Amniocentesis can be done after 15 weeks, and has a 0.5% risk of miscarriage. Fetal blood sampling can be done at about 18 weeks. Another option in the case of unclear genetic test results is fetal muscle biopsy.

[0102] E. Treatment

[0103] There is no current cure for DMD, and an ongoing medical need has been recognized by regulatory authorities. Phase 1-2a trials with exon skipping treatment for certain mutations have halted decline and produced small clinical improvements in walking. Treatment is generally aimed at controlling the onset of symptoms to maximize the quality of life, and may include the following:
[0104] 1. Corticosteroids such as prednisolone and deflazacort increase energy and strength and defer severity of some symptoms.
[0105] 2. Randomized control trials have shown that beta-2-agonists increase muscle strength but do not modify disease progression. Follow-up time for most RCTs on beta2-agonists is only around 12 months and hence results cannot be extrapolated beyond that time frame.
[0106] 3. Mild, non jarring physical activity such as swimming is encouraged. Inactivity (such as bed rest) can worsen the muscle disease.
[0107] 4. Physical therapy is helpful to maintain muscle strength, flexibility, and function.
[0108] 5. Orthopedic appliances (such as braces and wheelchairs) may improve mobility and the ability for self-care. Form-fitting removable leg braces that hold the ankle in place during sleep can defer the onset of contractures.
[0109] 6. Appropriate respiratory support as the disease progresses is important.
   Comprehensive multi-disciplinary care standards/guidelines for DMD have been developed by the Centers for Disease Control and Prevention (CDC), and are available at www.treat-nmd.eu/dmd/care/diagnosis-management-DMD.

[0110] DMD generally progresses through five stages, as outlined in Bushby et al., Lancet Neurol., 9(1): 77-93 (2010) and Bushby et al., Lancet Neurol., 9(2): 177-198 (2010), incorporated by reference in their entireties. During the presymptomatic stage, patients typically show developmental delay, but no gait disturbance. During the early ambulatory stage, patients typically show the Gowers' sign, waddling gait, and toe walking. During the late ambulatory stage, patients typically exhibit an increasingly labored gait and begin to lose the ability to climb stairs and rise from the floor. During the early non-ambulatory stage, patients are typically able to self-propel for some time, are able to maintain posture, and may develop scoliosis. During the late non-ambulatory stage, upper limb function and postural maintenance is increasingly limited.

[0111] In some embodiments, treatment is initiated in the presymptomatic stage of the disease. In some embodiments, treatment is initiated in the early ambulatory stage. In some embodiments, treatment is initiated in the late ambulatory stage. In embodiments, treatment is initiated during the early non-ambulatory stage. In embodiments, treatment is initiated during the late non-ambulatory stage.

[0112] 1. Physical Therapy

[0113] Physical therapists are concerned with enabling patients to reach their maximum physical potential. Their aim is to:
[0114] 1. minimize the development of contractures and deformity by developing a programme of stretches and exercises where appropriate,
[0115] 2. anticipate and minimize other secondary complications of a physical nature by recommending bracing and durable medical equipment, and
[0116] 3. monitor respiratory function and advise on techniques to assist with breathing exercises and methods of clearing secretions.

[0117] 2. Respiration Assistance

[0118] Modern “volume ventilators/respirators,” which deliver an adjustable volume (amount) of air to the person with each breath, are valuable in the treatment of people with muscular dystrophy related respiratory problems. The ventilator may require an invasive endotracheal or tracheotomy tube through which air is directly delivered, but, for some people non-invasive delivery through a face mask or mouthpiece is sufficient. Positive airway pressure machines, particularly bi-level ones, are sometimes used in this latter way. The respiratory equipment may easily fit on a ventilator tray on the bottom or back of a power wheelchair with an external battery for portability.

[0119] Ventilator treatment may start in the mid to late teens when the respiratory muscles can begin to collapse. If the vital capacity has dropped below 40% of normal, a volume ventilator/respirator may be used during sleeping hours, a time when the person is most likely to be under ventilating (“hypoventilating”). Hypoventilation during sleep is determined by a thorough history of sleep disorder with an oximetry study and a capillary blood gas (See Pulmonary Function Testing). A cough assist device can help with excess mucus in lungs by hyperinflation of the lungs with positive air pressure, then negative pressure to get the mucus up. If the vital capacity continues to decline to less than 30 percent of normal, a volume ventilator/respirator may also be needed during the day for more assistance. The person gradually will increase the amount of time using the ventilator/respirator during the day as needed.

[0120] F. Prognosis

[0121] Duchenne muscular dystrophy is a progressive disease which eventually affects all voluntary muscles and involves the heart and breathing muscles in later stages. The life expectancy is currently estimated to be around 25, but this varies from patient to patient. Recent advancements in medicine are extending the lives of those afflicted. The Muscular Dystrophy Campaign, which is a leading UK charity focusing on all muscle disease, states that “with high standards of medical care young men with Duchenne muscular dystrophy are often living well into their 30 s.”

[0122] In rare cases, persons with DMD have been seen to survive into the forties or early fifties, with the use of proper positioning in wheelchairs and beds, ventilator support (via tracheostomy or mouthpiece), airway clearance, and heart medications, if required. Early planning of the required supports for later-life care has shown greater longevity in people living with DMD.

[0123] Curiously, in the mdx mouse model of Duchenne muscular dystrophy, the lack of dystrophin is associated with increased calcium levels and skeletal muscle myonecrosis. The intrinsic laryngeal muscles (ILM) are protected and do not undergo myonecrosis. ILM have a calcium regulation system profile suggestive of a better ability to handle calcium changes in comparison to other muscles, and this may provide a mechanistic insight for their unique pathophysiological properties. The ILM may facilitate the development of novel strategies for the prevention and treatment of muscle wasting in a variety of clinical scenarios.

### II. OTHER DISEASES BENEFITING FROM GENOME EDITING

[0124] In addition to finding application in the treatment of DMD, the inventors' multiple-guide approach can be advantageously applied to other disease states where such intervention could result in correction of the underlying causal genetic defects. Some of these are described briefly below.

[0125] Limb Girdle Muscular Dystrophy. Limb-girdle muscular dystrophy (LGMD) or Erb's muscular dystrophy is a genetically and clinically heterogeneous group of rare muscular dystrophies. It is characterized by progressive muscle wasting which affects predominantly hip and shoulder muscles. LGMD has an autosomal pattern of inheritance and currently has no known cure. The symptoms of an individual with Limb-girdle muscular dystrophy (LGMD) generally has difficulty walking, going both up and down stairs and raising from a chair. Difficulty bending over and falling on a regular basis are also common. Difficulty lifting certain objects is also a common presentation of LGMD as well as difficulty holding your arms out or above your head. Eventually the ability to walk/run deteriorates.

[0126] The disease inevitably gets worse over time, although progression is more rapid in some patients than others. Eventually the disease can affect other muscles such as the ones located in the face. The disease commonly leads to dependence on a wheelchair within years of symptom onset, but there is high inter-patient variability, with some patients maintaining mobility.

[0127] The muscle weakness is generally symmetric, proximal, and slowly progressive. In most cases, pain is not present with LGMD, and mental function is not affected. LGMD can begin in childhood, adolescence, young adulthood or even later, the age of onset is usually between 10 and 30. Both genders are affected equally, when limb-girdle muscular dystrophy begins in childhood the progression appears to be faster and the disease more disabling. When the disorder begins in adolescence or adulthood the disease is generally not as severe and progresses more slowly. There is no sensory neuropathy or autonomic or visceral dysfunction at presentation.

[0128] In terms of the genetics of LGMD is an inherited disorder, though it may be inherited as a dominant or recessive genetic defect. The result of the defect is that the muscles cannot properly form certain proteins needed for normal muscle function. Several different proteins can be affected, and the specific protein that is absent or defective identifies the specific type of muscular dystrophy. Among the proteins affected in LGMD are α, β, γ and δ sarcoglycans. The sarcoglycanopathies could be possibly amenable to gene therapy.

[0129] Dysferlinopathy. Dysferlinopathy is an autosomal recessive neuromuscular disorder caused by a deficiency of functional dysferlin protein due to mutations in the dysferlin gene. Dysferlinopathy is characterized by progressive muscle wasting and is most often clinically diagnosed as Limb-girdle muscular dystrophy type 2B (LGMD2B) or Miyoshi muscular dystrophy 1 (MMD1; a type of distal muscular dystrophy), depending on the initial pattern of muscle involvement at diagnosis. Dysferlinopathy is a rare disease, the exact incidence of which has not yet been determined.

[0130] The symptoms of dysferlinopathy usually manifest in early adulthood between the ages of 16 and 25 and primarily affect the skeletal muscle of the limbs and the limb girdles (hips and shoulders), leaving critical muscles such as the heart and diaphragm largely unaffected. The majority of dysferlinopathy patients become non-ambulant within 10-20 years of diagnosis, but life expectancy is normal. There is a large amount of variability in the age of onset and progression of the disease.

[0131] Although LGMD2B and MMD1 are both caused by dysferlin deficiency, a diagnosis of LGMD2B is given when weakness initially presents in the proximal muscles (thighs and upper arms) while a diagnosis of MMD1 is given when weakness initially presents in the distal muscles (calves and lower arms). In both cases, weakness eventually progresses to include both distal and proximal muscles. Both LGMD2B and MMD1 are very difficult to diagnose, and patients are often misdiagnosed many times before they are successfully diagnosed with dysferlinopathy.

[0132] While “dysferlinopathy” simply refers to the absence of the dysferlin protein, LGMD2B and Miyoshi myopathy 1 are the confirmed diagnosis only when mutations in the dysferlin gene can be detected. It is essential that patients receive a genetic diagnosis for participation in clinical studies and trials specific to dysferlinopathy. The Jain Foundation is a non-profit family organization (www.jain-foundation.org) that helps patients with limb girdle muscular dystrophy to achieve a genetic diagnosis by organizing testing and covering the cost.

[0133] Titin Myopathy. Titin, also known as connectin, is a protein that, in humans, is encoded by the TTN gene. Titin is a giant protein, greater than 1 μm in length, that functions as a molecular spring which is responsible for the passive elasticity of muscle. It is composed of 244 individually folded protein domains connected by unstructured peptide sequences. These domains unfold when the protein is stretched and refold when the tension is removed.

[0134] Titin is important in the contraction of striated muscle tissues. It connects the Z line to the M line in the sarcomere. The protein contributes to force transmission at the Z line and resting tension in the I band region. It limits the range of motion of the sarcomere in tension, thus contributing to the passive stiffness of muscle. Variations in the sequence of titin between different types of muscle (e.g., cardiac or skeletal) have been correlated with differences in the mechanical properties of these muscles.

[0135] Titin is a large abundant protein of striated muscle. Titin's primary functions are to stabilize the thick filament, center it between the thin filaments, prevent overstretching of the sarcomere, and to recoil the sarcomere like a spring after it is stretched. An N-terminal Z-disc region and a C-terminal M-line region bind to the Z-line and M-line of the sarcomere, respectively, so that a single titin molecule spans half the length of a sarcomere. Titin also contains binding sites for muscle-associated proteins so it serves as an adhesion template for the assembly of contractile machinery in muscle cells. It has also been identified as a structural protein for chromosomes. Considerable variability exists in the I-band, the M-line and the Z-disc regions of titin. Variability in the I-band region contributes to the differences in elasticity of different titin isoforms and, therefore, to the differences in elasticity of different muscle types. Of the many titin variants identified, five are described with complete transcript information available.

[0136] Mutations anywhere within the unusually long sequence of this gene can cause premature stop codons or other defects. Titin mutations are associated with hereditary myopathy with early respiratory failure, early-onset myopathy with fatal cardiomyopathy, core myopathy with heart disease, centronuclear myopathy, Limb-girdle muscular dystrophy type 2J, familial dilated cardiomyopathy 9, hypertrophic cardiomyopathy and tibial muscular dystrophy. Further research also suggests that no genetically linked form of any dystrophy or myopathy can be safely excluded from being caused by a mutation on the TTN gene. Truncating mutations in dilated cardiomyopathy patients are most commonly found in the A region; although truncations in the upstream I region might be expected to prevent translation of the A region entirely, alternative splicing creates some transcripts that do not encounter the premature stop codon, ameliorating its effect. Autoantibodies to titin are produced in patients with the autoimmune disease scleroderma.

[0137] Congenital myopathy “central core disease” caused by mutation in ryanodine receptor (mutation with pseudoexons). Central core disease (CCD), also known as central core myopathy, is an autosomal dominant congenital myopathy (inborn muscle disorder). It was first described by Shy and Magee in 1956. It is characterized by the appearance of the myofibril under the microscope.

[0138] The symptoms of CCD are variable, but usually involve hypotonia (decreased muscle tone) at birth, mild delay in child development (highly variable between cases), weakness of the facial muscles, and skeletal malformations such as scoliosis and hip dislocation.

[0139] Symptoms may be present at birth or may appear at any stage of life. There appears to be a growing number of people who do not become symptomatic until adulthood to middle age. While generally not progressive, again there appears to be a growing number of people who do experience a slow clinically significant progression of symptomatology. These cases may hypothetically be due to the large number of gene mutations of ryanodine receptor malfunction, and with continued research may in fact be found to be clinical variants.

[0140] The diagnosis is made on the combination of typical symptoms and the appearance on biopsy (tissue sample) from muscle. The name derives from the typical appearance of the biopsy on light microscopy, where the muscle cells have cores that are devoid of mitochondria and specific enzymes. Respiratory insufficiency develops in a small proportion of cases. Creatine kinase and electromyography (EMG) tend to be normal.

[0141] Central core disease is inherited in an autosomal dominant fashion. Most cases have demonstrable mutations in the ryanodine receptor type 1 (RYR1) gene, which are often de novo (newly developed). People with CCD are at risk for malignant hyperthermia (MH) when receiving general anesthesia.

[0142] There is no specific treatment but triggering anesthetics are avoided and relatives are screened for RYR1 mutations as these may make them susceptible to MH.

[0143] Myotonic Dystrophy. Myotonic dystrophy is a long term genetic disorder that affects muscle function. Symptoms include gradually worsening muscle loss and weakness. Muscles often contract and are unable to relax. Other symptoms may include cataracts, intellectual disability, and heart conduction problems. In men there may be early balding and an inability to have children.

[0144] Myotonic dystrophy is an autosomal-dominant disorder which is typically inherited from a person's parents. There are two main types: type 1 (DM1) due to mutations in the DMPK gene and type 2 (DM2) due to mutations in the CNBP gene. The disorder generally worsens in each generation. A type of DM1 may be apparent at birth. DM2 is generally milder. They are types of muscular dystrophy. Diagnosis is confirmed by genetic testing.

[0145] There is no cure. Treatments may include braces or wheelchairs, pacemakers, and non-invasive positive pressure ventilation. The medications mexiletine or carbamazepine are occasionally helpful. Pain if it occurs may be treated with tricyclic antidepressants and nonsteroidal anti-inflammatory drugs (NSAIDs).

[0146] Myotonic dystrophy affects more than 1 in 8,000 people worldwide. While myotonic dystrophy can occur at any age, onset is typically in the 20 s and 30 s. It is the most common form of muscular dystrophy that begins in adulthood. It was first described in 1909 with the underlying cause of type 1 determined in 1992.

[0147] Presentation of symptoms and signs varies considerably by form (DM1/DM2), severity and even unusual DM2 phenotypes. DM1 symptoms for DM2 include problems with executive function (e.g., organization, concentration, word-finding) and hypersomnia. Conduction abnormalities are more common in DM1 than DM2, but all people are advised to have an annual ECG. Both types are also associated with insulin resistance. Myotonic dystrophy may have a cortical cataract with a blue dot appearance, or a posterior subcapsular cataract.

[0148] DM2 is generally milder than DM1, with generally fewer DM2 people requiring assistive devices than DM1 people. In addition, the severe congenital form that affects babies in DM1 has not been found in DM2 and the early onset of symptoms is rarely noted to appear in younger people in the medical literature.

[0149] Symptoms may appear at any time from infancy to adulthood. DM causes general weakness, usually beginning in the muscles of the hands, feet, neck, or face. It slowly progresses to involve other muscle groups, including the heart. DM affects a wide variety of other organ systems as well.

[0150] Myotonic dystrophy is a genetic condition which is inherited in an autosomal dominant pattern and thus will be passed along to 50% of a carrier's offspring, on average. Myotonic dystrophy is one of several known trinucleotide repeat disorders. Certain areas of DNA have repeated sequences of two or three nucleotides.

[0151] Myotonic dystrophy (DM) is an inherited disease. A severe form of DM, congenital myotonic dystrophy, may appear in newborns of mothers who have DM. Congenital myotonic dystrophy can also be inherited via the paternal gene, although it is said to be relatively rare. Congenital means that the condition is present from birth.

[0152] In DM1, the affected gene is called DMPK, which codes for myotonic dystrophy protein kinase, a protein expressed predominantly in skeletal muscle. The gene is located on the long arm of chromosome 19.

[0153] In DM1, there is an expansion of the cytosine-thymine-guanine (CTG) triplet repeat in the DMPK gene. Between 5 and 37 repeats is considered normal, while individuals with between 38 and 49 repeats are considered to have a pre-mutation and are at risk of having children with further expanded repeats and, therefore, symptomatic disease. Individuals with greater than 50 repeats are almost invariably symptomatic, with some noted exceptions. Longer repeats are usually associated with earlier onset and more severe disease.

[0154] DMPK alleles with greater than 37 repeats are unstable and additional trinucleotide repeats may be inserted during cell division in mitosis and meiosis. Consequently, the children of individuals with premutations or mutations inherit DMPK alleles which are longer than their parents and therefore are more likely to be affected or display an earlier onset and greater severity of the condition, a phenomenon known as anticipation. Interestingly, paternal transmission of the condition is very uncommon, possibly due to selection pressures against sperm with expanded repeats, but anticipation tends to be less severe than in cases of maternal inheritance.

[0155] The RNA from the expanded trinucleotide repeat region forms intranucleoplasmic hairpin loops due to the extensive hydrogen bonding between C-G base pairs, and it has been demonstrated that these sequester the splicing regulator MBNL1 to form distinctive foci by labelling it with GFP and a probe oligonucleotide with the red-fluorescent dye Cyanine5 (Cy5).

[0156] DM2 is caused by a defect of the ZNF9 gene on chromosome 3. The specific defect is a repeat of the cytosine-cytosine-thymine-guanosine (CCTG) tetranucleotide in the ZNF9 gene. As it involves the repeat of four nucleotides, it is not a trinucleotide repeat disorder, but rather a tetranucleotide repeat disorder.

[0157] The repeat expansion for DM2 is much larger than for DM1, ranging from 75 to over 11,000 repeats. Unlike in DM1, the size of the repeated DNA expansion in DM2 does not appear to make a difference in the age of onset or disease severity. Anticipation appears to be less significant in DM2 and most current reviews only report mild anticipation as a feature of DM2.

[0158] Friedreich's ataxia. Friedreich's ataxia is an autosomal recessive inherited disease that causes progressive damage to the nervous system. It manifests in initial symptoms of poor coordination such as gait disturbance; it can also lead to scoliosis, heart disease and diabetes, but does not affect cognitive function. The disease progresses until a wheelchair is required for mobility. Its incidence in the general population is roughly 1 in 50,000.

[0159] The particular genetic mutation (expansion of an intronic GAA triplet repeat in the FXN gene) leads to reduced expression of the mitochondrial protein frataxin. Over time this deficiency causes the aforementioned damage, as well as frequent fatigue due to effects on cellular metabolism.

[0160] The ataxia of Friedreich's ataxia results from the degeneration of nervous tissue in the spinal cord, in particular sensory neurons essential (through connections with the cerebellum) for directing muscle movement of the arms and legs. The spinal cord becomes thinner and nerve cells lose some of their myelin sheath (the insulating covering on some nerve cells that helps conduct nerve impulses).

[0161] Symptoms typically begin sometime between the ages of 5 to 15 years, but in Late Onset FA may occur in the 20 s or 30 s. Symptoms include any combination, but not necessarily all, of muscle weakness in the arms and legs, loss of coordination, vision impairment, hearing impairment, slurred speech, curvature of the spine, high plantar arches (pes cavus deformity of the foot), diabetes (about 20% of people with Friedreich's ataxia develop carbohydrate intolerance and 10% develop diabetes mellitus) and heart disorders (e.g., atrial fibrillation, and resultant tachycardia (fast heart rate) and hypertrophic cardiomyopathy).

[0162] It presents before 22 years of age with progressive staggering or stumbling gait and frequent falling. Lower extremities are more severely involved. The symptoms are slow and progressive. Long-term observation shows that many patients reach a plateau in symptoms in the patient's early adulthood. On average, after 10-15 years with the disease, patients are usually wheelchair bound and require assistance with all activities of daily living.

[0163] The following physical signs may be detected on physical examination: cerebellar signs such as nystagmus, fast saccadic eye movements, truncal ataxia, dysarthria, dysmetria; lower motor neuron lesions, such as absent deep tendon reflexes; pyramidal signs such as extensor plantar responses, and distal weakness are commonly found; dorsal column aspects, such as loss of vibratory and proprioceptive sensation occurs. Cardiac involvement occurs in 91% of patients, including cardiomegaly (up to dilated cardiomyopathy), symmetrical hypertrophy, heart murmurs, and conduction defects. Median age of death is 35 years, while females have better prognosis with a 20-year survival of 100% as compared to 63% in men. Twenty percent of cases are found in association with diabetes mellitus.

[0164] Friedreich's ataxia is an autosomal recessive disorder that occurs when the FXN gene contains amplified intronic GAA repeats (an example of trinucleotide repeat expansion). The FXN gene encodes the protein frataxin. GAA repeat expansion causes frataxin levels to be reduced. Frataxin is an iron-binding protein responsible for forming iron-sulphur clusters. One result of frataxin deficiency is mitochondrial iron overload which can cause damage to many proteins. The exact role of frataxin in normal physiology remains unclear. The gene is located on chromosome 9.

[0165] The mutant gene contains expanded GAA triplet repeats in the first intron; in a few pedigrees, point mutations have been detected. Because the defect is located in an intron (which is removed from the mRNA transcript between transcription and translation), this mutation does not result in the production of abnormal frataxin proteins. Instead, the mutation causes gene silencing (i.e., the mutation decreases the transcription of the gene) through induction of a heterochromatin structure in a manner similar to position-effect variegation.

[0166] Besides reducing expression of frataxin, long tracts of GAA repeats induce chromosome breaks in in vivo yeast studies.

[0167] Huntington's disease. Huntington's disease (HD), also known as Huntington's chorea, is an inherited disorder that results in death of brain cells. The earliest symptoms are often subtle problems with mood or mental abilities. A general lack of coordination and an unsteady gait often follow. As the disease advances, uncoordinated, jerky body movements become more apparent. Physical abilities gradually worsen until coordinated movement becomes difficult and the person is unable to talk. Mental abilities generally decline into dementia. The specific symptoms vary somewhat between people. Symptoms usually begin between 30 and 50 years of age, but can start at any age. The disease may develop earlier in life in each successive generation. About 8% of cases start before the age of 20 years and typically present with symptoms more similar to Parkinson's disease. People with HD often underestimate the degree of their problems.

[0168] HD is typically inherited from a person's parents with 10% of cases due to a new mutation. The disease is caused by an autosomal dominant mutation in either of an individual's two copies of a gene called Huntingtin. This means a child of an affected person typically has a 50% chance of inheriting the disease. The Huntingtin gene provides the genetic information for a protein that is also called “huntingtin.” Expansion of CAG (cytosine-adenine-guanine) triplet repeats in the gene coding for the Huntingtin protein results in an abnormal protein, which gradually damages cells in the brain, through mechanisms that are not fully understood. Diagnosis is by genetic testing, which can occur at any point in time regardless of whether or not symptoms are present. This fact raises several ethical debates: the age at which an individual is considered mature enough to choose testing; whether parents have the right to have their children tested; and managing confidentiality and disclosure of test results.

[0169] There is no cure for HD. Full-time care is required in the later stages of the disease. Treatments can relieve some symptoms and in some improve quality of life. The best evidence for treatment of the movement problems is with tetrabenazine. HD affects about 4 to 15 in 100,000 people of European descent. It is rare among Japanese and occurs at an unknown rate in Africa. The disease affects men and women equally. Complications such as pneumonia, heart disease, and physical injury from falls reduce life expectancy. Suicide is the cause of death in about 9% of cases. Death typically occurs fifteen to twenty years from when the disease was first detected.

[0170] Symptoms of Huntington's disease most commonly become noticeable between the ages of 35 and 44 years, but they can begin at any age from infancy to old age. In the early stages, there are subtle changes in personality, cognition, and physical skills. The physical symptoms are usually the first to be noticed, as cognitive and behavioral symptoms are generally not severe enough to be recognized on their own at the earlier stages. Almost everyone with Huntington's disease eventually exhibits similar physical symptoms, but the onset, progression and extent of cognitive and behavioral symptoms vary significantly between individuals.

[0171] The most characteristic initial physical symptoms are jerky, random, and uncontrollable movements called chorea. Chorea may be initially exhibited as general restlessness, small unintentionally initiated or uncompleted motions, lack of coordination, or slowed saccadic eye movements. These minor motor abnormalities usually precede more obvious signs of motor dysfunction by at least three years. The clear appearance of symptoms such as rigidity, writhing motions or abnormal posturing appear as the disorder progresses. These are signs that the system in the brain that is responsible for movement has been affected. Psychomotor functions become increasingly impaired, such that any action that requires muscle control is affected. Common consequences are physical instability, abnormal facial expression, and difficulties chewing, swallowing, and speaking. Eating difficulties commonly cause weight loss and may lead to malnutrition. Sleep disturbances are also associated symptoms. Juvenile HD differs from these symptoms in that it generally progresses faster and chorea is exhibited briefly, if at all, with rigidity being the dominant symptom. Seizures are also a common symptom of this form of HD.

[0172] Cognitive abilities are progressively impaired. Especially affected are executive functions which include planning, cognitive flexibility, abstract thinking, rule acquisition, initiation of appropriate actions, and inhibition of inappropriate actions. As the disease progresses, memory deficits tend to appear. Reported impairments range from short-term memory deficits to long-term memory difficulties, including deficits in episodic (memory of one's life), procedural (memory of the body of how to perform an activity) and working memory. Cognitive problems tend to worsen over time, ultimately leading to dementia. This pattern of deficits has been called a subcortical dementia syndrome to distinguish it from the typical effects of cortical dementias, e.g., Alzheimer's disease.

[0173] Reported neuropsychiatric manifestations are anxiety, depression, a reduced display of emotions (blunted affect), egocentrism, aggression, and compulsive behavior, the latter of which can cause or worsen addictions, including alcoholism, gambling, and hypersexuality.

[0174] Difficulties in recognizing other people's negative expressions have also been observed. The prevalence of these symptoms is highly variable between studies, with estimated rates for lifetime prevalence of psychiatric disorders between 33% and 76%. For many sufferers and their families, these symptoms are among the most distressing aspects of the disease, often affecting daily functioning and constituting reason for institutionalization. Suicidal thoughts and suicide attempts are more common than in the general population. Often individuals have reduced awareness of chorea, cognitive and emotional impairments.

[0175] Mutant Huntingtin is expressed throughout the body and associated with abnormalities in peripheral tissues that are directly caused by such expression outside the brain. These abnormalities include muscle atrophy, cardiac failure, impaired glucose tolerance, weight loss, osteoporosis, and testicular atrophy.

[0176] All humans have two copies of the Huntingtin gene (HTT), which codes for the protein Huntingtin (HTT). The gene is also called HD and IT15, which stands for ‘interesting transcript 15’. Part of this gene is a repeated section called a trinucleotide repeat, which varies in length between individuals and may change length between generations. If the repeat is present in a healthy gene, a dynamic mutation may increase the repeat count and result in a defective gene. When the length of this repeated section reaches a certain threshold, it produces an altered form of the protein, called mutant Huntingtin protein (mHTT). The differing functions of these proteins are the cause of pathological changes which in turn cause the disease symptoms. The Huntington's disease mutation is genetically dominant and almost fully penetrant: mutation of either of a person's HTT alleles causes the disease. It is not inherited according to sex, but the length of the repeated section of the gene and hence its severity can be influenced by the sex of the affected parent.

[0177] HD is one of several trinucleotide repeat disorders which are caused by the length of a repeated section of a gene exceeding a normal range. The HTT gene is located on the short arm of chromosome 4 at 4p16.3. HTT contains a sequence of three DNA bases—cytosine-adenine-guanine (CAG)—repeated multiple times (i.e., . . . CAGCAGCAG . . . ), known as a trinucleotide repeat. CAG is the 3-letter genetic code (codon) for the amino acid glutamine, so a series of them results in the production of a chain of glutamine known as a polyglutamine tract (or polyQ tract), and the repeated part of the gene, the PolyQ region.

[0178] Generally, people have fewer than 36 repeated glutamines in the polyQ region which results in production of the cytoplasmic protein Huntingtin. However, a sequence of 36 or more glutamines results in the production of a protein which has different characteristics. This altered form, called mutant huntingtin (mHTT), increases the decay rate of certain types of neurons. Regions of the brain have differing amounts and reliance on these types of neurons, and are affected accordingly. Generally, the number of CAG repeats is related to how much this process is affected, and accounts for about 60% of the variation of the age of the onset of symptoms.

[0179] The remaining variation is attributed to environment and other genes that modify the mechanism of HD. 36-39 repeats result in a reduced-penetrance form of the disease, with a much later onset and slower progression of symptoms. In some cases the onset may be so late that symptoms are never noticed. With very large repeat counts, HD has full penetrance and can occur under the age of 20, when it is then referred to as juvenile HD, akinetic-rigid, or Westphal variant HD. This accounts for about 7% of HD carriers.

[0180] Ataxia telangiectasia. Ataxia-telangiectasia (AT or A-T), also referred to as ataxia-telangiectasia syndrome or Louis-Bar syndrome, is a rare, neurodegenerative, autosomal recessive disease causing severe disability. Ataxia refers to poor coordination and telangiectasia to small dilated blood vessels, both of which are hallmarks of the disease.

[0181] A-T affects many parts of the body. It impairs certain areas of the brain including the cerebellum, causing difficulty with movement and coordination. It weakens the immune system, causing a predisposition to infection. It prevents repair of broken DNA, increasing the risk of cancer.

[0182] Symptoms most often first appear in early childhood (the toddler stage) when children begin to walk. Though they usually start walking at a normal age, they wobble or sway when walking, standing still or sitting, and may appear almost as if they are drunk. In late pre-school and early school age, they develop difficulty moving their eyes in a natural manner from one place to the next (oculomotor apraxia). They develop slurred or distorted speech, and swallowing problems. Some have an increased number of respiratory tract infections (ear infections, sinusitis, bronchitis, and pneumonia). Because not all children develop in the same manner or at the same rate, it may be some years before A-T is properly diagnosed. Most children with A-T have stable neurologic symptoms for the first 4-5 years of life, but begin to show increasing problems in early school years.

[0183] A-T is caused by a defect in the ATM gene, which is responsible for managing the cell's response to multiple forms of stress including double-strand breaks in DNA. In simple terms, the protein produced by the ATM gene recognizes that there is a break in DNA, recruits other proteins to fix the break, and stops the cell from making new DNA until the repair is complete.

[0184] There is substantial variability in the severity of features of A-T among affected individuals, and at different ages. The following symptoms or problems are either common or important features of A-T:
[0185] Ataxia (difficulty with control of movement) that is apparent early but worsens in school to pre-teen years.
[0186] Oculomotor apraxia (difficulty with coordination of head and eye movement when shifting gaze from one place to the next).
[0187] Involuntary movements.
[0188] Telangiectasia (dilated blood vessels) over the white (sclera) of the eyes, making them appear bloodshot. These are not apparent in infancy and may first appear at age 5-8 years. Telangiectasia may also appear on sun-exposed areas of skin.
[0189] Problems with infections, especially of the ears, sinuses and lungs.
[0190] Increased incidence of cancer (primarily, but not exclusively, lymphomas and leukemias).
[0191] Delayed onset or incomplete pubertal development, and very early menopause.
[0192] Slowed rate of growth (weight and/or height).
[0193] Drooling particularly in young children when they are tired or concentrating on activities.
[0194] Dysarthria (slurred, slow, or distorted speech sounds).
[0195] Diabetes in adolescence or later.
[0196] Premature changes in hair and skin.
   Many children are initially misdiagnosed as having ataxic cerebral palsy. The diagnosis of A-T may not be made until the preschool years when the neurologic symptoms of impaired gait, hand coordination, speech and eye movement appear or worsen, and the telangiectasia first appear. Because A-T is so rare, doctors may not be familiar with the symptoms, or methods of making a diagnosis. The late appearance of telangiectasia may be a barrier to the diagnosis. It may take some time before doctors consider A-T as a possibility because of the early stability of symptoms and signs.

[0197] A-T is caused by mutations in the ATM (ATM serine/threonine kinase or ataxia-telangiectasia mutated) gene, which was cloned in 1995. ATM is located on human chromosome 11 (11q22.3) and is made up of 69 exons spread across 150 kb of genomic DNA.

[0198] The mode of inheritance for A-T is autosomal recessive. Each parent is a carrier, meaning that they have one normal copy of the A-T gene (ATM) and one copy which is mutated. A-T occurs if a child inherits the mutated A-T gene from each parent, so in a family with two carrier parents, there is 1 chance in 4 that a child born to the parents will have the disorder. Prenatal diagnosis (and carrier detection) can be carried out in families if the errors (mutation) in an affected child's two ATM genes have been identified. The process of getting this done can be complicated and, as it requires time, should be arranged before conception.

[0199] Looking for mutations in the ATM gene of an unrelated person (for example, the spouse of a known A-T carrier) presents significant challenges. Genes often have variant spellings (polymorphisms) which do not affect function. In a gene as large as ATM, such variant spellings are likely to occur and doctors cannot always predict whether a specific variant will or will not cause disease. Genetic counseling can help family members of an A-T patient understand what can or cannot be tested, and how the test results should be interpreted.

[0200] Carriers of A-T, such as the parents of a person with A-T, have one mutated copy of the ATM gene and one normal copy. They are generally healthy, but there is an increased risk of breast cancer in women. This finding has been confirmed in a variety of different ways, and is the subject of current research. Standard surveillance (including monthly breast self-exams and mammography at the usual schedule for age) is recommended, unless additional tests are indicated because the individual has other risk factors (e.g., family history of breast cancer).

[0201] Neurofibromatosis type 1 and 2. Neurofibromatosis (NF) is a group of three conditions in which tumors grow in the nervous system. The three types are neurofibromatosis type 1 (NF1), neurofibromatosis type 2 (NF2), and schwannomatosis. In NF1 symptoms include light brown spots on the skin, freckles in the armpit and groin, small bumps within nerves, and scoliosis. In NF2 there may be hearing loss, cataracts at a young age, balance problems, flesh colored skin flaps, and muscle wasting. The tumors are generally non-cancerous.

[0202] The cause is a genetic mutation in certain genes. In half of cases these are inherited from a person's parents while in the rest they occur during early development. The tumors involve supporting cells in the nervous system rather than the neurons. In NF1 the tumors are neurofibromas (tumors of the peripheral nerves) while in NF2 and schwannomatosis tumors of

[0203] Schwann cells are more common. Diagnosis is typically based on the signs and symptoms and occasionally supported by genetic testing.

[0204] There is no known prevention or cure. Surgery may be done to remove tumors that are causing problems or have become cancerous. Radiation and chemotherapy may also be used if cancer occurs. A cochlear implant or auditory brainstem implant may help some who have hearing loss.

[0205] In the United States about 1 in 3,500 people have NF1 and 1 in 25,000 have NF2. Males and females are affected equally frequently. In NF1 symptom are often present at birth and otherwise develop before 10 years of age. While the condition typically worsens with time most people with NF1 have a normal life expectancy. In NF2 symptoms may not become apparent until early adulthood. NF2 increases the risk of early death. Descriptions of the condition occur as far back as the 1st century.

[0206] Neurofibromatosis (NF1) in early life may cause learning and behavior problems—about 60% of children who have NF1 have a mild form of difficulty in school. In terms of signs the individual might have are the following: six or more light brown dermatological spots (“café-au-lait spots”), at least two neurofibromas, at least two growths on the eye's iris, and abnormal growth of the spine (scoliosis).

[0207] Neurofibromatosis is an autosomal dominant disorder, which means only one copy of the affected gene is needed for the disorder to develop. Therefore, if only one parent has neurofibromatosis, his or her children have a 50% chance of developing the condition as well. The affected child could have mild NF1 even though inherited from a parent with a severe form of the disorder. There two types of neurofibromatosis. Neurofibromatosis type I is characterized by nerve tissue growth into tumors (neurofibromas) that may be benign and may cause serious damage by compressing nerves and other tissues. Neurofibromatosis type II exhibits bilateral acoustic neuromas (tumors of the vestibulocochlear nerve or cranial nerve 8 (CN VIII) also known as schwannoma), often leading to hearing loss.

[0208] Schwannomatosis, in which painful schwannomas develop on spinal and peripheral nerves.

[0209] CEP290 mutation in Leber congenital amaurosis. Centrosomal protein of 290 kDa is a protein that in humans is encoded by the CEP290 gene. CEP290 is located on the Q arm of chromosome 12. The gene CEP290 is a centrosomal protein that plays an important role in centrosome and cilia development. This gene is vital in the formation of the primary cilium, a small antenna-like projections of the cell membrane that plays an important role in the photoreceptors at the back of the retina (which detect light and color) and in the kidney, brain, and many other organs of the body. Knocking down levels of the CEP290 gene transcript resulted in dramatic suppression of ciliogenesis in retinal pigment epithelial cells in culture, proving just how important CEP290 is to cilia formation.

[0210] On a molecular level, CEP290 has been shown to play a critical regulatory and structural role in primary cilium formation. Recent studies have implicated CEP290 as a microtubule and membrane binding protein that might serve as a structural link between the microtubule core of the cilium and the overlying ciliary membrane. Disruption of CEP290's microtubule binding domain in the rd16 mouse model of CEP290 disease has been shown to result in rapid and dramatic retinal degeneration, demonstrating the importance of CEP290 microtubule binding in disease. The role of CEP290 in promoting ciliogensis is inhibited both by auto-regulatory domains found at either end of the CEP290 protein and through CEP290's interaction with the inhibitory protein CP110.

[0211] The discovery of the CEP290 gene has led researchers to find another gene critical in retinal function, LCAS. Clinical trials involving gene replacement of these two genes have started in Philadelphia, where researchers are hopeful that Leber Congenital Amaurosis will one day be cured.

[0212] This gene encodes a protein with 13 putative coiled-coil domains, a region with homology to SMC chromosome segregation ATPases, six KID motifs, three tropomyosin homology domains and an ATP/GTP binding site motif A. The protein is localized to the centrosome and cilia and has sites for N-glycosylation, tyrosine sulfation, phosphorylation, N-myristoylation, and amidation.

[0213] Mutations in this gene have been associated with Joubert syndrome and nephronophthisis, and recently with a frequent form of Leber's Congenital Amaurosis, called LCA10. The presence of antibodies against this protein is associated with several forms of cancer.

[0214] A mutation in this gene leads to infant and child blindness, a disease known as Leber Congenital Amaurosis. As of today, 35 different mutations in CEP290 are responsible for causing LCA. Other mutations in CEP290 have also been identified in causing Meckel Syndrome and Joubert Syndrome, a few among many syndromes. A defective CEP290 gene is usually the cause of these disorders due to abnormal cilia. It is unknown how one mutation in a gene can cause so many different types of syndromes, particularly many of which affect the Central Nervous System.

### III. CRISPR SYSTEMS

[0215] A. CRISPRs

[0216] CRISPRs (clustered regularly interspaced short palindromic repeats) are DNA loci containing short repetitions of base sequences. Each repetition is followed by short segments of “spacer DNA” from previous exposures to a virus. CRISPRs are found in approximately 40% of sequenced eubacteria genomes and 90% of sequenced archaea. CRISPRs are often associated with Cas genes that code for proteins related to CRISPRs. The CRISPR/Cas system is a prokaryotic immune system that confers resistance to foreign genetic elements such as plasmids and phages and provides a form of acquired immunity. CRISPR spacers recognize and silence these exogenous genetic elements like RNAi in eukaryotic organisms.

[0217] CRISPR repeats range in size from 24 to 48 base pairs. They usually show some dyad symmetry, implying the formation of a secondary structure such as a hairpin, but are not truly palindromic. Repeats are separated by spacers of similar length. Some CRISPR spacer sequences exactly match sequences from plasmids and phages, although some spacers match the prokaryote's genome (self-targeting spacers). New spacers can be added rapidly in response to phage infection.

[0218] B. Cas Nucleases

[0219] CRISPR-associated (cas) genes are often associated with CRISPR repeat-spacer arrays. As of 2013, more than forty different Cas protein families had been described. Of these protein families, Cas1 appears to be ubiquitous among different CRISPR/Cas systems. Particular combinations of cas genes and repeat structures have been used to define 8 CRISPR subtypes (Ecoli, Ypest, Nmeni, Dvulg, Tneap, Hmari, Apern, and Mtube), some of which are associated with an additional gene module encoding repeat-associated mysterious proteins (RAMPs). More than one CRISPR subtype may occur in a single genome. The sporadic distribution of the CRISPR/Cas subtypes suggests that the system is subject to horizontal gene transfer during microbial evolution.

[0220] Exogenous DNA is apparently processed by proteins encoded by Cas genes into small elements (˜30 base pairs in length), which are then somehow inserted into the CRISPR locus near the leader sequence. RNAs from the CRISPR loci are constitutively expressed and are processed by Cas proteins to small RNAs composed of individual, exogenously-derived sequence elements with a flanking repeat sequence. The RNAs guide other Cas proteins to silence exogenous genetic elements at the RNA or DNA level. Evidence suggests functional diversity among CRISPR subtypes. The Cse (Cas subtype Ecoli) proteins (called CasA-E in E. coli) form a functional complex, Cascade, that processes CRISPR RNA transcripts into spacer-repeat units that Cascade retains. In other prokaryotes, Cas6 processes the CRISPR transcripts. Interestingly, CRISPR-based phage inactivation in E. coli requires Cascade and Cas3, but not Cas1 and Cas2. The Cmr (Cas RAMP module) proteins found in Pyrococcus furiosus and other prokaryotes form a functional complex with small CRISPR RNAs that recognizes and cleaves complementary target RNAs. RNA-guided CRISPR enzymes are classified as type V restriction enzymes.

[0221] Cas9 is a nuclease, an enzyme specialized for cutting DNA, with two active cutting sites, one for each strand of the double helix. The team demonstrated that they could disable one or both sites while preserving Cas9's ability to locate its target DNA. Jinek et al. (2012) combined tracrRNA and spacer RNA into a “single-guide RNA” molecule that, mixed with Cas9, can find and cut the correct DNA targets and such synthetic guide RNAs are used for gene editing.

[0222] Cas9 proteins are highly enriched in pathogenic and commensal bacteria. CRISPR/Cas-mediated gene regulation may contribute to the regulation of endogenous bacterial genes, particularly during bacterial interaction with eukaryotic hosts. For example, Cas protein Cas9 of Francisella novicida uses a unique, small, CRISPR/Cas-associated RNA (scaRNA) to repress an endogenous transcript encoding a bacterial lipoprotein that is critical for F. novicida to dampen host response and promote virulence. Wang et al. (2013) showed that coinjection of Cas9 mRNA and sgRNAs into the germline (zygotes) generated mice with mutations. Delivery of Cas9 DNA sequences also is contemplated.

[0223] The systems CRISPR/Cas are separated into three classes. Class 1 uses several Cas proteins together with the CRISPR RNAs (crRNA) to build a functional endonuclease. Class 2 CRISPR systems use a single Cas protein with a crRNA. Cpf1 has been recently identified as a Class II, Type V CRISPR/Cas systems containing a 1,300 amino acid protein. See also U.S. Patent Publication 2014/0068797, which is incorporated by reference in its entirety.

[0224] In some embodiments, the compositions of the disclosure include a small version of a Cas9 from the bacterium Staphylococcus aureus (UniProt Accession No. J7RUA5). The small version of the Cas9 provides advantages over wildtype or full length Cas9. In some embodiments the Cas9 is a spCas9 (AddGene).

[0225] C. Cpf1 Nucleases

[0226] Clustered Regularly Interspaced Short Palindromic Repeats from Prevotella and Francisella 1 or CRISPR/Cpf1 is a DNA-editing technology which shares some similarities with the CRISPR/Cas9 system. Cpf1 is an RNA-guided endonuclease of a class II CRISPR/Cas system. This acquired immune mechanism is found in Prevotella and Francisella bacteria. It prevents genetic damage from viruses. Cpf1 genes are associated with the CRISPR locus, coding for an endonuclease that use a guide RNA to find and cleave viral DNA. Cpf1 is a smaller and simpler endonuclease than Cas9, overcoming some of the CRISPR/Cas9 system limitations.

[0227] Cpf1 appears in many bacterial species. The ultimate Cpf1 endonuclease that was developed into a tool for genome editing was taken from one of the first 16 species known to harbor it.

[0228] In embodiments, the Cpf1 is a Cpf1 enzyme from Acidaminococcus (species BV3L6, UniProt Accession No. U2UMQ6; SEQ ID NO: 870), having the sequence set forth below:

| | |
|---|---|
| 1 | MTQFEGFTNL YQVSKTLRFE LIPQGKTLKH IQEQGFIEED |
| | KARNDHYKEL KPIIDRIYKT |
| 61 | YADQCLQLVQ LDWENLSAAI DSYRKEKTEE TRNALIEEQA |
| | TYRNAIHDYF IGRTDNLTDA |
| 121 | INKRHAEIYK GLFKAELFNG KVLKQLGTVT TTEHENALLR |
| | SFDKFTTYFS GFYENRKNVF |
| 181 | SAEDISTAIP HRIVQDNFPK FKENCHIFTR LITAVPSLRE |
| | HFENVKKAIG IFVSTSIEEV |
| 241 | FSFPFYNQLL TQTQIDLYNQ LLGGISREAG TEKIKGLNEV |
| | LNLAIQKNDE TAHIIASLPH |
| 301 | RFIPLFKQIL SDRNTLSFIL EEFKSDEEVI QSFCKYKTLL |
| | RNENVLETAE ALFNELNSID |
| 361 | LTHIFISHKK LETISSALCD HWDTLRNALY ERRISELTGK |
| | ITKSAKEKVQ RSLKHEDINL |
| 421 | QEIISAAGKE LSEAFKQKTS EILSHAHAAL DQPLPTTLKK |
| | QEEKEILKSQ LDSLLGLYHL |
| 481 | LDWFAVDESN EVDPEFSARL TGIKLEMEPS LSFYNKARNY |
| | ATKKPYSVEK FKLNFQMPTL |
| 541 | ASGWDVNKEK NNGAILFVKN GLYYLGIMPK QKGRYKALSF |
| | EPTEKTSEGF DKMYYDYFPD |
| 601 | AAKMIPKCST QLKAVTAHFQ THTTPILLSN NFIEPLEITK |
| | EIYDLNNPEK EPKKFQTAYA |
| 661 | KKTGDQKGYR EALCKWIDFT RDFLSKYTKT TSIDLSSLRP |
| | SSQYKDLGEY YAELNPLLYH |
| 721 | ISFQRIAEKE IMDAVETGKL YLFQIYNKDF AKGHHGKPNL |
| | HTLYWTGLFS PENLAKTSIK |
| 781 | LNGQAELFYR PKSRMKRMAH RLGEKMLNKK LKDQKTPIPD |
| | TLYQELYDYV NHRLSHDLSD |
| 841 | EARALLPNVI TKEVSHEIIK DRRFTSDKFF FHVPITLNYQ |
| | AANSPSKFNQ RVNAYLKEHP |
| 901 | ETPIIGIDRG ERNLIYITVI DSTGKILEQR SLNTIQQFDY |
| | QKKLDNREKE RVAARQAWSV |
| 961 | VGTIKDLKQG YLSQVIHEIV DLMIHYQAVV VLENLNFGFK |
| | SKRTGIAEKA VYQQFEKMLI |
| 1021 | DKLNCLVLKD YPAEKVGGVL NPYQLTDQFT SFAKMGTQSG |
| | FLFYVPAPYT SKIDPLTGFV |
| 1081 | DPFVWKTIKN HESRKHFLEG FDFLHYDVKT GDFILHFKMN |
| | RNLSFQRGLP GFMPAWDIVF |
| 1141 | EKNETQFDAK GTPFIAGKRI VPVIENHRFT GRYRDLYPAN |
| | ELIALLEEKG IVFRDGSNIL |
| 1201 | PKLLENDDSH AIDTMVALIR SVLQMRNSNA ATGEDYINSP |
| | VRDLNGVCFD SRFQNPEWPM |
| 1261 | DADANGAYHI ALKGQLLLNH LKESKDLKLQ NGISNQDWLA |
| | YIQELRN |

[0229] In some embodiments, the Cpf1 is a Cpf1 enzyme from Lachnospiraceae (species ND2006, UniProt Accession No. A0A182DWE3; SEQ ID NO: 871), having the sequence set forth below:

| | |
|---|---|
| 1 | AASKLEKFTN CYSLSKTLRF KAIPVGKTQE NIDNKRLLVE |
| | DEKRAEDYKG VKKLLDRYYL |
| 61 | SFINDVLHSI KLKNLNNYIS LFRKKTRTEK ENKELENLEI |
| | NLRKEIAKAF KGAAGYKSLF |
| 121 | KKDIIETILP EAADDKDEIA LVNSFNGFTT AFTGFFDNRE |
| | NMFSEEAKST SIAFRCINEN |
| 181 | LTRYISNMDI FEKVDAIFDK HEVQEIKEKI LNSDYDVEDF |
| | FEGEFFNFVL TQEGIDVYNA |
| 241 | IIGGFVTESG EKIKGLNEYI NLYNAKTKQA LPKFKPLYKQ |
| | VLSDRESLSF YGEGYTSDEE |
| 301 | VLEVFRNTLN KNSEIFSSIK KLEKLFKNFD EYSSAGIFVK |
| | NGPAISTISK DIFGEWNLIR |
| 361 | DKWNAEYDDI HLKKKAVVTE KYEDDRRKSF KKIGSFSLEQ |
| | LQEYADADLS VVEKLKEIII |
| 421 | QKVDEIYKVY GSSEKLFDAD FVLEKSLKKN DAVVAIMKDL |
| | LDSVKSFENY IKAFFGEGKE |
| 481 | TNRDESFYGD FVLAYDILLK VDHIYDAIRN YVTQKPYSKD |
| | KFKLYFQNPQ FMGGWDKDKE |
| 541 | TDYRATILRY GSKYYLAIMD KKYAKCLQKI DKDDVNGNYE |
| | KINYKLLPGP NKMLPKVFFS |
| 601 | KKWMAYYNPS EDIQKIYKNG TFKKGDMFNL NDCHKLIDFF |
| | KDSISRYPKW SNAYDFNFSE |
| 661 | TEKYKDIAGF YREVEEQGYK VSFESASKKE VDKLVEEGKL |
| | YMFQIYNKDF SDKSHGTPNL |
| 721 | HTMYFKLLFD ENNHGQIRLS GGAELFMRRA SLKKEELVVH |
| | PANSPIANKN PDNPKKTTTL |
| 781 | SYDVYKDKRF SEDQYELHIP IAINKCPKNI FKINTEVRVL |
| | LKHDDNPYVI GIDRGERNLL |
| 841 | YIVVVDGKGN IVEQYSLNEI INNFNGIRIK TDYHSLLDKK |
| | EKERFEARQN WTSIENIKEL |
| 901 | KAGYISQVVH KICELVEKYD AVIALEDLNS GFKNSRVKVE |
| | KQVYQKFEKM LIDKLNYMVD |
| 961 | KKSNPCATGG ALKGYQITNK FESFKSMSTQ NGFIFYIPAW |
| | LTSKIDPSTG FVNLLKTKYT |
| 1021 | SIADSKKFIS SFDRIMYVPE EDLFEFALDY KNFSRTDADY |
| | IKKWKLYSYG NRIRIFAAAK |
| 1081 | KNNVFAWEEV CLTSAYKELF NKYGINYQQG DIRALLCEQS |
| | DKAFYSSFMA LMSLMLQMRN |
| 1141 | SITGRTDVDF LISPVKNSDG IFYDSRNYEA QENAILPKNA |
| | DANGAYNIAR KVLWAIGQFK |
| 1201 | KAEDEKLDKV KIAISNKEWL EYAQTSVK |

[0230] In some embodiments, the Cpf1 is codon optimized for expression in mammalian cells. In some embodiments, the Cpf1 is codon optimized for expression in human cells or mouse cells.

[0231] The Cpf1 locus contains a mixed alpha/beta domain, a RuvC-I followed by a helical region, a RuvC-II and a zinc finger-like domain. The Cpf1 protein has a RuvC-like endonuclease domain that is similar to the RuvC domain of Cas9. Furthermore, Cpf1 does not have a HNH endonuclease domain, and the N-terminal of Cpf1 does not have the alpha-helical recognition lobe of Cas9.

[0232] Cpf1 CRISPR-Cas domain architecture shows that Cpf1 is functionally unique, being classified as Class 2, type V CRISPR system. The Cpf1 loci encode Cas1, Cas2 and Cas4 proteins more similar to types I and III than from type II systems. Database searches suggest the abundance of Cpf1-family proteins in many bacterial species.

[0233] Functional Cpf1 does not require a tracrRNA, therefore, only crRNA is required. This benefits genome editing because Cpf1 is not only smaller than Cas9, but also it has a smaller sgRNA molecule (proximately half as many nucleotides as Cas9).

[0234] The Cpf1-crRNA complex cleaves target DNA or RNA by identification of a protospacer adjacent motif 5′-YTN-3′ (where “Y” is a pyrimidine and “N” is any nucleobase) or 5′-TTN-3′, in contrast to the G-rich PAM targeted by Cas9. After identification of PAM, Cpf1 introduces a sticky-end-like DNA double-tranded break of 4 or 5 nucleotides overhang.

[0235] The CRISPR/Cpf1 system consist of a Cpf1 enzyme and a guide RNA that finds and positions the complex at the correct spot on the double helix to cleave target DNA. CRISPR/Cpf1 systems activity has three stages:
[0236] Adaptation, during which Cas1 and Cas2 proteins facilitate the adaptation of small fragments of DNA into the CRISPR array;
[0237] Formation of crRNAs: processing of pre-cr-RNAs producing of mature crRNAs to guide the Cas protein; and
[0238] Interference, in which the Cpf1 is bound to a crRNA to form a binary complex to identify and cleave a target DNA sequence.

[0239] D. gRNA

[0240] As an RNA guided protein, Cas9 requires a short RNA to direct the recognition of DNA targets. Though Cas9 preferentially interrogates DNA sequences containing a PAM sequence NGG it can bind here without a protospacer target. However, the Cas9-gRNA complex requires a close match to the gRNA to create a double strand break. CRISPR sequences in bacteria are expressed in multiple RNAs and then processed to create guide strands for RNA. Because Eukaryotic systems lack some of the proteins required to process CRISPR RNAs the synthetic construct gRNA was created to combine the essential pieces of RNA for Cas9 targeting into a single RNA expressed with the RNA polymerase type III promoter U6. Synthetic gRNAs are slightly over 100 bp at the minimum length and contain a portion which is targets the 20 protospacer nucleotides immediately preceding the PAM sequence NGG; gRNAs do not contain a PAM sequence.

[0241] In some embodiments, the gRNA targets a site within a wildtype dystrophin gene. In some embodiments, the gRNA targets a site within a mutant dystrophin gene. In some embodiments, the gRNA targets a dystrophin intron. In some embodiments, the gRNA targets a dystrophin exon. In some embodiments, the gRNA targets a site in a dystrophin exon that is expressed and is present in one or more of the dystrophin isoforms shown in Table 1. In embodiments, the gRNA targets a dystrophin splice site. In some embodiments, the gRNA targets a splice donor site on the dystrophin gene. In embodiments, the gRNA targets a splice acceptor site on the dystrophin gene.

[0242] In embodiments, the guide RNA targets a mutant DMD exon. In some embodiments, the mutant exon is exon 23 or 51. In some embodiments, the guide RNA targets at least one of exons 1, 23, 41, 44, 46, 47, 48, 49, 50, 51, 52, 53, 54, or 55 of the dystrophin gene. In embodiments, the guide RNA targets at least one of introns 44, 45, 50, 51, 52, 53, 54, or 55 of the dystrophin gene. In preferred embodiments, the guide RNAs are designed to induce skipping of exon 51 or exon 23. In embodiments, the gRNA is targeted to a splice acceptor site of exon 51 or exon 23.

[0243] Suitable gRNAs for use in various compositions and methods disclosed herein are provided as SEQ ID NOs. 383-705, 709-711, 715-717, 790-862, 864. (Tables 7, 9, 11, 13, and 15). In preferred embodiments, the gRNA is selected from any one of SEQ ID No: 790 to SEQ ID No: 862.

[0244] In some embodiments, gRNAs of the disclosure comprise a sequence that is complementary to a target sequence within a coding sequence or a non-coding sequence corresponding to the DMD gene, and, therefore, hybridize to the target sequence. In some embodiments, gRNAs for Cpf1 comprise a single crRNA containing a direct repeat scaffold sequence followed by 24 nucleotides of guide sequence. In some embodiments, a “guide” sequence of the crRNA comprises a sequence of the gRNA that is complementary to a target sequence. In some embodiments, crRNA of the disclosure comprises a sequence of the gRNA that is not complementary to a target sequence. “Scaffold” sequences of the disclosure link the gRNA to the Cpf1 polypeptide. “Scaffold” sequences of the disclosure are not equivalent to a tracrRNA sequence of a gRNA-Cas9 construct.

[0245] In some embodiments, a nucleic acid may comprise one or more sequences encoding a gRNA. In some embodiments, a nucleic acid may comprise 1, 2, 3, 4, 5, 6, 7, 8, 9, 10, 11, 12, 13, 14, 15, 16, 17, 18, 19, 20 sequences encoding a gRNA. In some embodiments, all of the sequences encode the same gRNA. In some embodiments, all of the sequences encode different gRNAs. In some embodiments, at least 2 of the sequences encode the same gRNA, for example at least 3, 4, 5, 6, 7, 8, 9, 10, 11, 12, 13, 14, 15, 16, 17, 18, 19, or 20 of the sequences encode the same gRNA.

[0246] E. Cas9 Versus Cpf1

[0247] Cas9 requires two RNA molecules to cut DNA while Cpf1 needs one. The proteins also cut DNA at different places, offering researchers more options when selecting an editing site. Cas9 cuts both strands in a DNA molecule at the same position, leaving behind ‘blunt’ ends. Cpf1 leaves one strand longer than the other, creating ‘sticky’ ends that are easier to work with. Cpf1 appears to be more able to insert new sequences at the cut site, compared to Cas9. Although the CRISPR/Cas9 system can efficiently disable genes, it is challenging to insert genes or generate a knock-in. Cpf1 lacks tracrRNA, utilizes a T-rich PAM and cleaves DNA via a staggered DNA DSB.

[0248] In summary, important differences between Cpf1 and Cas9 systems are that Cpf1 recognizes different PAMs, enabling new targeting possibilities, creates 4-5 nt long sticky ends, instead of blunt ends produced by Cas9, enhancing the efficiency of genetic insertions and specificity during NHEJ or HDR, and cuts target DNA further away from PAM, further away from the Cas9 cutting site, enabling new possibilities for cleaving the DNA.

TABLE 3
Differences between Cas9 and Cpf1

| Feature | Cas9 | Cpf1 |
|---|---|---|
| Structure | Two RNA required (Or | One RNA required |
| | 1 fusion transcript | |
| | (crRNA + tracrRNA = gRNA)) | |
| Cutting | Blunt end cuts | Staggered end cuts |
| mechanism | | |
| Cutting site | Proximal to recognition site | Distal from |
| | | recognition site |
| Target sites | G-rich PAM | T-rich PAM |

### F. CRISPR-Mediated Gene Editing

[0249] The first step in editing the DMD gene using CRISPR/Cpf1 or CRISPR/Cas9 is to identify the genomic target sequence. The genomic target for the gRNAs of the disclosure can be any ˜24 nucleotide DNA sequence, provided that the sequence is unique compared to the rest of the genome. In some embodiments, the genomic target sequence corresponds to a sequence within exon 51, exon 45, exon 44, exon 53, exon 46, exon 52, exon 50, exon 43, exon 6, exon 7, exon 8, and/or exon 55 of the human dystrophin gene. In some embodiments, the genomic target sequence is a 5′ or 3′ splice site of exon 51, exon 45, exon 44, exon 53, exon 46, exon 52, exon 50, exon 43, exon 6, exon 7, exon 8, and/or exon 55 of the human dystrophin gene. In some embodiments, the genomic target sequence corresponds to a sequence within an intron immediately upstream or downstream of exon 51, exon 45, exon 44, exon 53, exon 46, exon 52, exon 50, exon 43, exon 6, exon 7, exon 8, and/or exon 55 of the human dystrophin gene. Exemplary genomic target sequences can be found in Tables 6, 8, 10, 12, and 14.

[0250] The next step in editing the DMD gene is to identify all Protospacer Adjacent Motif (PAM) sequences within the genetic region to be targeted. The target sequence must be immediately upstream of a PAM. Once all possible PAM sequences and putative target sites have been identified, the next step is to choose which site is likely to result in the most efficient on-target cleavage. The gRNA targeting sequence needs to match the target sequence, and the gRNA targeting sequence must not match additional sites within the genome. In preferred embodiments, the gRNA targeting sequence has perfect homology to the target with no homology elsewhere in the genome. In some embodiments, a given gRNA targeting sequence will have additional sites throughout the genome where partial homology exists. These sites are called “off-targets” and should be considered when designing a gRNA. In general, off-target sites are not cleaved as efficiently when mismatches occur near the PAM sequence, so gRNAs with no homology or those with mismatches close to the PAM sequence will have the highest specificity. In addition to “off-target activity”, factors that maximize cleavage of the desired target sequence (“on-target activity”) must be considered. It is known to those of skill in the art that two gRNA targeting sequences, each having 100% homology to the target DNA may not result in equivalent cleavage efficiency. In fact, cleavage efficiency may increase or decrease depending upon the specific nucleotides within the selected target sequence. Close examination of predicted on-target and off-target activity of each potential gRNA targeting sequence is necessary to design the best gRNA. Several gRNA design programs have been developed that are capable of locating potential PAM and target sequences and ranking the associated gRNAs based on their predicted on-target and off-target activity (e.g. CRISPRdirect, available at www.crispr.dbcls.jp).

[0251] The next step is to synthesize and clone desired gRNAs. Targeting oligos can be synthesized, annealed, and inserted into plasmids containing the gRNA scaffold using standard restriction-ligation cloning. However, the exact cloning strategy will depend on the gRNA vector that is chosen. The gRNAs for Cpf1 are notably simpler than the gRNAs for Cas9, and only consist of a single crRNA containing direct repeat scaffold sequence followed by ˜24 nucleotides of guide sequence.

[0252] Each gRNA should then be validated in one or more target cell lines. For example, after the Cas9 or Cpf1 and the gRNA are delivered to the cell, the genomic target region may be amplified using PCR and sequenced according to methods known to those of skill in the art.

[0253] In some embodiments, gene editing may be performed in vitro or ex vivo. In some embodiments, cells are contacted in vitro or ex vivo with a Cas9 or a Cpf1 and a gRNA that targets a dystrophin splice site. In some embodiments, the cells are contacted with one or more nucleic acids encoding the Cas9 or Cpf1 and the guide RNA. In some embodiments, the one or more nucleic acids are introduced into the cells using, for example, lipofection or electroporation. Gene editing may also be performed in zygotes. In embodiments, zygotes may be injected with one or more nucleic acids encoding Cas9 or Cpf1 and a gRNA that targets a dystrophin splice site. The zygotes may subsequently be injected into a host.

[0254] In embodiments, the Cas9 or Cpf1 is provided on a vector. In embodiments, the vector contains a Cas9 derived from S. pyogenes (SpCas9, SEQ ID NO. 872). In embodiments, the vector contains a Cas9 derived from S. aureus (SaCas9, SEQ ID NO. 873). In embodiments, the vector contains a Cpf1 sequence derived from a Lachnospiraceae bacterium. See, for example, Uniprot Accession No. A0A182DWE3; SEQ ID NO. 871. In embodiments, the vector contains a Cpf1 sequence derived from an Acidaminococcus bacterium. See, for example, Uniprot Accession No. U2UMQ6; SEQ ID NO. 870. In some embodiments, the Cas9 or Cpf1 sequence is codon optimized for expression in human cells or mouse cells. In some embodiments, the vector further contains a sequence encoding a fluorescent protein, such as GFP, which allows Cas 9 or Cpf1 -expressing cells to be sorted using fluorescence activated cell sorting (FACS). In some embodiments, the vector is a viral vector such as an adeno-associated viral vector.

[0255] In embodiments, the gRNA is provided on a vector. In some embodiments, the vector is a viral vector such as an adeno-associated viral vector. In embodiments, the Cas9 or Cpf1 and the guide RNA are provided on the same vector. In embodiments, the Cas9 or Cpf1 and the guide RNA are provided on different vectors.

[0256] In some embodiments, the cells are additionally contacted with a single-stranded DMD oligonucleotide to effect homology directed repair. In some embodiments, small INDELs restore the protein reading frame of dystrophin (“reframing” strategy). When the reframing strategy is used, the cells may be contacted with a single gRNA. In embodiments, a splice donor or splice acceptor site is disrupted, which results in exon skipping and restoration of the protein reading frame (“exon skipping” strategy). When the exon skipping strategy is used, the cells may be contacted with two or more gRNAs.

[0257] Efficiency of in vitro or ex vivo Cas9 or Cpf1-mediated DNA cleavage may be assessed using techniques known to those of skill in the art, such as the T7 E1 assay. Restoration of DMD expression may be confirmed using techniques known to those of skill in the art, such as RT-PCR, western blotting, and immunocytochemistry.

[0258] In some embodiments, in vitro or ex vivo gene editing is performed in a muscle or satellite cell. In some embodiments, gene editing is performed in iPSC or iCM cells. In embodiments, the iPSC cells are differentiated after gene editing. For example, the iPSC cells may be differentiated into a muscle cell or a satellite cell after editing. In embodiments, the iPSC cells are differentiated into cardiac muscle cells, skeletal muscle cells, or smooth muscle cells. In embodiments, the iPSC cells are differentiated into cardiomyocytes. iPSC cells may be induced to differentiate according to methods known to those of skill in the art.

[0259] In some embodiments, contacting the cell with the Cas9 or the Cpf1 and the gRNA restores dystrophin expression. In embodiments, cells which have been edited in vitro or ex vivo, or cells derived therefrom, show levels of dystrophin protein that is comparable to wildtype cells. In embodiments, the edited cells, or cells derived therefrom, express dystrophin at a level that is 50%, 60%, 70%, 80%, 90%, 95% or any percentage in between of wildtype dystrophin expression levels. In embodiments, the cells which have been edited in vitro or ex vivo, or cells derived therefrom, have a mitochondrial number that is comparable to that of wildtype cells. In embodiments the edited cells, or cells derived therefrom, have 50%, 60%, 70%, 80%, 90%, 95% or any percentage in between as many mitochondria as wildtype cells. In embodiments, the edited cells, or cells derived therefrom, show an increase in oxygen consumption rate (OCR) compared to non-edited cells at baseline.

[0260] G. RNA Pol III and Pol III Promoters

[0261] In eukaryotes, RNA polymerase III (also called Pol III) transcribes DNA to synthesize ribosomal 5S rRNA, tRNA and other small RNAs. The genes transcribed by RNA Pol III fall in the category of “housekeeping” genes whose expression is required in all cell types and most environmental conditions. Therefore, the regulation of Pol III transcription is primarily tied to the regulation of cell growth and the cell cycle, thus requiring fewer regulatory proteins than RNA polymerase II. Under stress conditions however, the protein Mafl represses Pol III activity.

[0262] In the process of transcription (by any polymerase) there are three main stages: (i) initiation, requiring construction of the RNA polymerase complex on the gene's promoter; (ii) elongation, the synthesis of the RNA transcript; and (iii) termination, the finishing of RNA transcription and disassembly of the RNA polymerase complex.

[0263] Promoters under the control of RNA Pol III include those for ribosomal 5S rRNA, tRNA and few other small RNAs such as U6 spliceosomal RNA, RNase P and RNase MRP RNA, 7SL RNA (the RNA component of the signal recognition particles), Vault RNAs, Y RNA, SINEs (short interspersed repetitive elements), 7SK RNA, two microRNAs, several small nucleolar RNAs and several few regulatory antisense RNAs

### IV. NUCLEIC ACID DELIVERY

[0264] As discussed above, in certain embodiments, expression cassettes are employed to express a transcription factor product, either for subsequent purification and delivery to a cell/subject, or for use directly in a genetic-based delivery approach. Provided herein are expression vectors which contain one or more nucleic acids encoding Cas9 or Cpf1 and at least one DMD guide RNA that targets a dystrophin splice site. In some embodiments, a nucleic acid encoding Cas9 or Cpf1 and a nucleic acid encoding at least one guide RNA are provided on the same vector. In further embodiments, a nucleic acid encoding Cas9 or Cpf1 and a nucleic acid encoding least one guide RNA are provided on separate vectors.

[0265] Expression requires that appropriate signals be provided in the vectors, and include various regulatory elements such as enhancers/promoters from both viral and mammalian sources that drive expression of the genes of interest in cells. Elements designed to optimize messenger RNA stability and translatability in host cells also are defined. The conditions for the use of a number of dominant drug selection markers for establishing permanent, stable cell clones expressing the products are also provided, as is an element that links expression of the drug selection markers to expression of the polypeptide.

[0266] A. Regulatory Elements

[0267] Throughout this application, the term “expression cassette” is meant to include any type of genetic construct containing a nucleic acid coding for a gene product in which part or all of the nucleic acid encoding sequence is capable of being transcribed and translated, i.e., is under the control of a promoter. A “promoter” refers to a DNA sequence recognized by the synthetic machinery of the cell, or introduced synthetic machinery, required to initiate the specific transcription of a gene. The phrase “under transcriptional control” means that the promoter is in the correct location and orientation in relation to the nucleic acid to control RNA polymerase initiation and expression of the gene. An “expression vector” is meant to include expression cassettes comprised in a genetic construct that is capable of replication, and thus including one or more of origins of replication, transcription termination signals, poly-A regions, selectable markers, and multipurpose cloning sites.

[0268] The term promoter will be used here to refer to a group of transcriptional control modules that are clustered around the initiation site for RNA polymerase II. Much of the thinking about how promoters are organized derives from analyses of several viral promoters, including those for the HSV thymidine kinase (tk) and SV40 early transcription units. These studies, augmented by more recent work, have shown that promoters are composed of discrete functional modules, each consisting of approximately 7-20 bp of DNA, and containing one or more recognition sites for transcriptional activator or repressor proteins.

[0269] At least one module in each promoter functions to position the start site for RNA synthesis. The best known example of this is the TATA box, but in some promoters lacking a TATA box, such as the promoter for the mammalian terminal deoxynucleotidyl transferase gene and the promoter for the SV40 late genes, a discrete element overlying the start site itself helps to fix the place of initiation.

[0270] In some embodiments, the Cas9 or Cpf1 constructs of the disclosure are expressed by a muscle-cell specific promoter. This muscle-cell specific promoter may be constitutively active or may be an inducible promoter.

[0271] Additional promoter elements regulate the frequency of transcriptional initiation. Typically, these are located in the region 30-110 bp upstream of the start site, although a number of promoters have recently been shown to contain functional elements downstream of the start site as well. The spacing between promoter elements frequently is flexible, so that promoter function is preserved when elements are inverted or moved relative to one another. In the tk promoter, the spacing between promoter elements can be increased to 50 bp apart before activity begins to decline. Depending on the promoter, it appears that individual elements can function either co-operatively or independently to activate transcription.

[0272] In certain embodiments, viral promotes such as the human cytomegalovirus (CMV) immediate early gene promoter, the SV40 early promoter, the Rous sarcoma virus long terminal repeat, rat insulin promoter and glyceraldehyde-3-phosphate dehydrogenase can be used to obtain high-level expression of the coding sequence of interest. The use of other viral or mammalian cellular or bacterial phage promoters which are well-known in the art to achieve expression of a coding sequence of interest is contemplated as well, provided that the levels of expression are sufficient for a given purpose. By employing a promoter with well-known properties, the level and pattern of expression of the protein of interest following transfection or transformation can be optimized. Further, selection of a promoter that is regulated in response to specific physiologic signals can permit inducible expression of the gene product.

[0273] Enhancers are genetic elements that increase transcription from a promoter located at a distant position on the same molecule of DNA. Enhancers are organized much like promoters. That is, they are composed of many individual elements, each of which binds to one or more transcriptional proteins. The basic distinction between enhancers and promoters is operational. An enhancer region as a whole must be able to stimulate transcription at a distance; this need not be true of a promoter region or its component elements. On the other hand, a promoter must have one or more elements that direct initiation of RNA synthesis at a particular site and in a particular orientation, whereas enhancers lack these specificities. Promoters and enhancers are often overlapping and contiguous, often seeming to have a very similar modular organization.

[0274] Below is a list of promoters/enhancers and inducible promoters/enhancers that could be used in combination with the nucleic acid encoding a gene of interest in an expression construct. Additionally, any promoter/enhancer combination (as per the Eukaryotic Promoter Data Base EPDB) could also be used to drive expression of the gene. Eukaryotic cells can support cytoplasmic transcription from certain bacterial promoters if the appropriate bacterial polymerase is provided, either as part of the delivery complex or as an additional genetic expression construct.

[0275] The promoter and/or enhancer may be, for example, immunoglobulin light chain, immunoglobulin heavy chain, T-cell receptor, HLA DQ a and/or DQ β, β-interferon, interleukin-2, interleukin-2 receptor, MHC class II 5, MHC class II HLA-Dra, β-Actin, muscle creatine kinase (MCK), prealbumin (transthyretin), elastase I, metallothionein (MTII), collagenase, albumin, α-fetoprotein, β-globin, c-fos, c-HA-ras, insulin, neural cell adhesion molecule (NCAM), α₁-antitrypain, H2B (TH2B) histone, mouse and/or type I collagen, glucose-regulated proteins (GRP94 and GRP78), rat growth hormone, human serum amyloid A (SAA), troponin I (TN I), platelet-derived growth factor (PDGF), duchenne muscular dystrophy, SV40, polyoma, retroviruses, papilloma virus, hepatitis B virus, human immunodeficiency virus, cytomegalovirus (CMV), and gibbon ape leukemia virus.

[0276] In some embodiments, inducible elements may be used. In some embodiments, the inducible element is, for example, MTII, MMTV (mouse mammary tumor virus), β-interferon, adenovirus 5 E2, collagenase, stromelysin, SV40, murine MX gene, GRP78 gene, α-2-macroglobulin, vimentin, MHC class I gene H-2κb, HSP70, proliferin, tumor necrosis factor, and/or thyroid stimulating hormone a gene. In some embodiments, the inducer is phorbol ester (TFA), heavy metals, glucocorticoids, poly(rI)x, poly(rc), EIA, phorbol ester (TPA), interferon, Newcastle Disease Virus, A23187, IL-6, serum, interferon, SV40 large T antigen, PMA, and/or thyroid hormone. Any of the inducible elements described herein may be used with any of the inducers described herein.

[0277] Of particular interest are muscle specific promoters. These include the myosin light chain-2 promoter, the α-actin promoter, the troponin 1 promoter; the Na⁺/Ca²⁺ exchanger promoter, the dystrophin promoter, the α7 integrin promoter, the brain natriuretic peptide promoter and the αB-crystallin/small heat shock protein promoter, α-myosin heavy chain promoter and the ANF promoter. In some embodiments, the muscle specific promoter is the CK8 promoter. The CK8 promoter has the following sequence (SEQ ID NO. 874):

| | |
|---|---|
| 1 | CTAGACTAGC ATGCTGCCCA TGTAAGGAGG CAAGGCCTGG |
| | GGACACCCGA GATGCCTGGT |
| 61 | TATAATTAAC CCAGACATGT GGCTGCCCCC CCCCCCCCAA |
| | CACCTGCTGC CTCTAAAAAT |
| 121 | AACCCTGCAT GCCATGTTCC CGGCGAAGGG CCAGCTGTCC |
| | CCCGCCAGCT AGACTCAGCA |
| 181 | CTTAGTTTAG GAACCAGTGA GCAAGTCAGC CCTTGGGGCA |
| | GCCCATACAA GGCCATGGGG |
| 241 | CTGGGCAAGC TGCACGCCTG GGTCCGGGGT GGGCACGGTG |
| | CCCGGGCAAC GAGCTGAAAG |
| 301 | CTCATCTGCT CTCAGGGGCC CCTCCCTGGG GACAGCCCCT |
| | CCTGGCTAGT CACACCCTGT |
| 361 | AGGCTCCTCT ATATAACCCA GGGGCACAGG GGCTGCCCTC |
| | ATTCTACCAC CACCTCCACA |
| 421 | GCACAGACAG ACACTCAGGA GCCAGCCAGC |

[0278] In some embodiments, the muscle-cell cell specific promoter is a variant of the CK8 promoter, called CK8e. The CK8e promoter has the following sequence (SEQ ID NO. 875):

| | |
|---|---|
| 1 | TGCCCATGTA AGGAGGCAAG GCCTGGGGAC ACCCGAGATG |
| | CCTGGTTATA ATTAACCCAG |
| 61 | ACATGTGGCT GCCCCCCCCC CCCCAACACC TGCTGCCTCT |
| | AAAAATAACC CTGCATGCCA |
| 121 | TGTTCCCGGC GAAGGGCCAG CTGTCCCCCG CCAGCTAGAC |
| | TCAGCACTTA GTTTAGGAAC |
| 181 | CAGTGAGCAA GTCAGCCCTT GGGGCAGCCC ATACAAGGCC |
| | ATGGGGCTGG GCAAGCTGCA |
| 241 | CGCCTGGGTC CGGGGTGGGC ACGGTGCCCG GGCAACGAGC |
| | TGAAAGCTCA TCTGCTCTCA |
| 301 | GGGGCCCCTC CCTGGGGACA GCCCCTCCTG GCTAGTCACA |
| | CCCTGTAGGC TCCTCTATAT |
| 361 | AACCCAGGGG CACAGGGGCT GCCCTCATTC TACCACCACC |
| | TCCACAGCAC AGACAGACAC |
| 421 | TCAGGAGCCA GCCAGC |

[0279] Where a cDNA insert is employed, one will typically desire to include a polyadenylation signal to effect proper polyadenylation of the gene transcript. Any polyadenylation sequence may be employed such as human growth hormone and SV40 polyadenylation signals. Also contemplated as an element of the expression cassette is a terminator. These elements can serve to enhance message levels and to minimize read through from the cassette into other sequences.

[0280] B. 2A Peptide

[0281] In some embodiments, a 2A-like self-cleaving domain from the insect virus Thosea asigna (TaV 2A peptide)(SEQ ID NO. 876, EGRGSLLTCGDVEENPGP) is used. These 2A-like domains have been shown to function across eukaryotes and cause cleavage of amino acids to occur co-translationally within the 2A-like peptide domain. Therefore, inclusion of TaV 2A peptide allows the expression of multiple proteins from a single mRNA transcript. Importantly, the domain of TaV when tested in eukaryotic systems has shown greater than 99% cleavage activity. Other acceptable 2A-like peptides include, but are not limited to, equine rhinitis A virus (ERAV) 2A peptide (SEQ ID NO. 877; QCTNYALLKLAGDVESNPGP), porcine teschovirus-1 (PTV1) 2A peptide (SEQ ID NO. 878; ATNFSLLKQAGDVEENPGP) and foot and mouth disease virus (FMDV) 2A peptide (SEQ ID NO. 879; PVKQLLNFDLLKLAGDVESNPGP) or modified versions thereof

[0282] In some embodiments, the 2A peptide is used to express a reporter and a Cas9 or a Cpf1 simultaneously. The reporter may be, for example, GFP.

[0283] Other self-cleaving peptides that may be used include, but are not limited to nuclear inclusion protein a (Nia) protease, a P1 protease, a 3C protease, a L protease, a 3C-like protease, or modified versions thereof.

[0284] C. Delivery of Expression Vectors

[0285] There are a number of ways in which expression vectors may be introduced into cells. In certain embodiments, the expression construct comprises a virus or engineered construct derived from a viral genome. The ability of certain viruses to enter cells via receptor-mediated endocytosis, to integrate into host cell genome and express viral genes stably and efficiently have made them attractive candidates for the transfer of foreign genes into mammalian cells . These have a relatively low capacity for foreign DNA sequences and have a restricted host spectrum. Furthermore, their oncogenic potential and cytopathic effects in permissive cells raise safety concerns. They can accommodate only up to 8 kB of foreign genetic material but can be readily introduced in a variety of cell lines and laboratory animals.

[0286] One of the preferred methods for in vivo delivery involves the use of an adenovirus expression vector. “Adenovirus expression vector” is meant to include those constructs containing adenovirus sequences sufficient to (a) support packaging of the construct and (b) to express an antisense polynucleotide that has been cloned therein. In this context, expression does not require that the gene product be synthesized.

[0287] The expression vector comprises a genetically engineered form of adenovirus. Knowledge of the genetic organization of adenovirus, a 36 kB, linear, double-stranded DNA virus, allows substitution of large pieces of adenoviral DNA with foreign sequences up to 7 kB. In contrast to retrovirus, the adenoviral infection of host cells does not result in chromosomal integration because adenoviral DNA can replicate in an episomal manner without potential genotoxicity. Also, adenoviruses are structurally stable, and no genome rearrangement has been detected after extensive amplification. Adenovirus can infect virtually all epithelial cells regardless of their cell cycle stage. So far, adenoviral infection appears to be linked only to mild disease such as acute respiratory disease in humans.

[0288] Adenovirus is particularly suitable for use as a gene transfer vector because of its mid-sized genome, ease of manipulation, high titer, wide target cell range and high infectivity. Both ends of the viral genome contain 100-200 base pair inverted repeats (ITRs), which are cis elements necessary for viral DNA replication and packaging. The early (E) and late (L) regions of the genome contain different transcription units that are divided by the onset of viral DNA replication. The E1 region (E1A and E1B) encodes proteins responsible for the regulation of transcription of the viral genome and a few cellular genes. The expression of the E2 region (E2A and E2B) results in the synthesis of the proteins for viral DNA replication. These proteins are involved in DNA replication, late gene expression and host cell shut-off. The products of the late genes, including the majority of the viral capsid proteins, are expressed only after significant processing of a single primary transcript issued by the major late promoter (MLP). The MLP, (located at 16.8 m.u.) is particularly efficient during the late phase of infection, and all the mRNAs issued from this promoter possess a 5□-tripartite leader (TPL) sequence which makes them preferred mRNAs for translation.In one system, recombinant adenovirus is generated from homologous recombination between shuttle vector and provirus vector. Due to the possible recombination between two proviral vectors, wild-type adenovirus may be generated from this process. Therefore, it is critical to isolate a single clone of virus from an individual plaque and examine its genomic structure.

[0289] Generation and propagation of the current adenovirus vectors, which are replication deficient, depend on a unique helper cell line, designated 293, which was transformed from human embryonic kidney cells by Ad5 DNA fragments and constitutively expresses E1 proteins. Since the E3 region is dispensable from the adenovirus genome, the current adenovirus vectors, with the help of 293 cells, carry foreign DNA in either the El, the D3 or both regions. In nature, adenovirus can package approximately 105% of the wild-type genome, providing capacity for about 2 extra kb of DNA. Combined with the approximately 5.5 kb of DNA that is replaceable in the E1 and E3 regions, the maximum capacity of the current adenovirus vector is under 7.5 kb, or about 15% of the total length of the vector. More than 80% of the adenovirus viral genome remains in the vector backbone and is the source of vector-borne cytotoxicity. Also, the replication deficiency of the E1-deleted virus is incomplete.

[0290] Helper cell lines may be derived from human cells such as human embryonic kidney cells, muscle cells, hematopoietic cells or other human embryonic mesenchymal or epithelial cells. Alternatively, the helper cells may be derived from the cells of other mammalian species that are permissive for human adenovirus. Such cells include, e.g., Vero cells or other monkey embryonic mesenchymal or epithelial cells. As stated above, the preferred helper cell line is 293.

[0291] Improved methods for culturing 293 cells and propagating adenovirus are known in the art. In one format, natural cell aggregates are grown by inoculating individual cells into 1 liter siliconized spinner flasks (Techne, Cambridge, UK) containing 100-200 ml of medium. Following stirring at 40 rpm, the cell viability is estimated with trypan blue. In another format, Fibra-Cel microcarriers (Bibby Sterlin, Stone, UK) (5 g/l) is employed as follows. A cell inoculum, resuspended in 5 ml of medium, is added to the carrier (50 ml) in a 250 ml Erlenmeyer flask and left stationary, with occasional agitation, for 1 to 4 h. The medium is then replaced with 50 ml of fresh medium and shaking initiated. For virus production, cells are allowed to grow to about 80% confluence, after which time the medium is replaced (to 25% of the final volume) and adenovirus added at an MOI of 0.05. Cultures are left stationary overnight, following which the volume is increased to 100% and shaking commenced for another 72 h.

[0292] The adenoviruses of the disclosure are replication defective, or at least conditionally replication defective. The adenovirus may be of any of the 42 different known serotypes or subgroups A-F. Adenovirus type 5 of subgroup C is the preferred starting material in order to obtain the conditional replication-defective adenovirus vector for use in the present disclosure.

[0293] As stated above, the typical vector according to the present disclosure is replication defective and will not have an adenovirus E1 region. Thus, it will be most convenient to introduce the polynucleotide encoding the gene of interest at the position from which the E1-coding sequences have been removed. However, the position of insertion of the construct within the adenovirus sequences is not critical. The polynucleotide encoding the gene of interest may also be inserted in lieu of the deleted E3 region in E3 replacement vectors, or in the E4 region where a helper cell line or helper virus complements the E4 defect.

[0294] Adenovirus is easy to grow and manipulate and exhibits broad host range in vitro and in vivo. This group of viruses can be obtained in high titers, e.g., 10⁹-10¹² plaque-forming units per ml, and they are highly infective. The life cycle of adenovirus does not require integration into the host cell genome. The foreign genes delivered by adenovirus vectors are episomal and, therefore, have low genotoxicity to host cells. No side effects have been reported in studies of vaccination with wild-type adenovirus, demonstrating their safety and therapeutic potential as in vivo gene transfer vectors.

[0295] Adenovirus vectors have been used in eukaryotic gene expression and vaccine development. Animal studies suggested that recombinant adenovirus could be used for gene therapy. Studies in administering recombinant adenovirus to different tissues include trachea instillation, muscle injection, peripheral intravenous injections and stereotactic inoculation into the brain.

[0296] The retroviruses are a group of single-stranded RNA viruses characterized by an ability to convert their RNA to double-stranded DNA in infected cells by a process of reverse-transcription. The resulting DNA then stably integrates into cellular chromosomes as a provirus and directs synthesis of viral proteins. The integration results in the retention of the viral gene sequences in the recipient cell and its descendants. The retroviral genome contains three genes, gag, pol, and env that code for capsid proteins, polymerase enzyme, and envelope components, respectively. A sequence found upstream from the gag gene contains a signal for packaging of the genome into virions. Two long terminal repeat (LTR) sequences are present at the 5′ and 3′ ends of the viral genome. These contain strong promoter and enhancer sequences and are also required for integration in the host cell genome.

[0297] In order to construct a retroviral vector, a nucleic acid encoding a gene of interest is inserted into the viral genome in the place of certain viral sequences to produce a virus that is replication-defective. In order to produce virions, a packaging cell line containing the gag, pol, and env genes but without the LTR and packaging components is constructed. When a recombinant plasmid containing a cDNA, together with the retroviral LTR and packaging sequences is introduced into this cell line (by calcium phosphate precipitation for example), the packaging sequence allows the RNA transcript of the recombinant plasmid to be packaged into viral particles, which are then secreted into the culture media. The media containing the recombinant retroviruses is then collected, optionally concentrated, and used for gene transfer. Retroviral vectors are able to infect a broad variety of cell types. However, integration and stable expression require the division of host cells.

[0298] A novel approach designed to allow specific targeting of retrovirus vectors was recently developed based on the chemical modification of a retrovirus by the chemical addition of lactose residues to the viral envelope. This modification could permit the specific infection of hepatocytes via sialoglycoprotein receptors.

[0299] A different approach to targeting of recombinant retroviruses may be used, in which biotinylated antibodies against a retroviral envelope protein and against a specific cell receptor are used. The antibodies are coupled via the biotin components by using streptavidin. Using antibodies against major histocompatibility complex class I and class II antigens, it has been demonstrated the infection of a variety of human cells that bore those surface antigens with an ecotropic virus in vitro (Roux et al., 1989).

[0300] There are certain limitations to the use of retrovirus vectors in all aspects of the present disclosure. For example, retrovirus vectors usually integrate into random sites in the cell genome. This can lead to insertional mutagenesis through the interruption of host genes or through the insertion of viral regulatory sequences that can interfere with the function of flanking genes. Another concern with the use of defective retrovirus vectors is the potential appearance of wild-type replication-competent virus in the packaging cells. This can result from recombination events in which the intact-sequence from the recombinant virus inserts upstream from the gag, pol, env sequence integrated in the host cell genome. However, new packaging cell lines are now available that should greatly decrease the likelihood of recombination (see, for example, Markowitz et al., 1988; Hersdorffer et al., 1990).

[0301] Other viral vectors may be employed as expression constructs in the present disclosure. Vectors derived from viruses such as vaccinia virus adeno-associated virus (AAV) and herpesviruses may be employed. They offer several attractive features for various mammalian cells.

[0302] In embodiments, the AAV vector is replication-defective or conditionally replication defective. In embodiments, the AAV vector is a recombinant AAV vector. In some embodiments, the AAV vector comprises a sequence isolated or derived from an AAV vector of serotype AAV1, AAV2, AAV3, AAV4, AAV5, AAV6, AAV7, AAV8, AAV9, AAV10, AAV11 or any combination thereof.

[0303] In some embodiments, a single viral vector is used to deliver a nucleic acid encoding a Cas9 or a Cpf1 and at least one gRNA to a cell. In some embodiments, Cas9 or Cpf1 is provided to a cell using a first viral vector and at least one gRNA is provided to the cell using a second viral vector.

[0304] In some embodiments, a single viral vector is used to deliver a nucleic acid encoding Cas9 or Cpf1 and at least one gRNA to a cell. In some embodiments, Cas9 or Cpf1 is provided to a cell using a first viral vector and at least one gRNA is provided to the cell using a second viral vector. In order to effect expression of sense or antisense gene constructs, the expression construct must be delivered into a cell. The cell may be a muscle cell, a satellite cell, a mesangioblast, a bone marrow derived cell, a stromal cell or a mesenchymal stem cell. In embodiments, the cell is a cardiac muscle cell, a skeletal muscle cell, or a smooth muscle cell. In embodiments, the cell is a cell in the tibialis anterior, quadriceps, soleus, diaphragm or heart. In some embodiments, the cell is an induced pluripotent stem cell (iPSC) or inner cell mass cell (iCM). In further embodiments, the cell is a human iPSC or a human iCM. In some embodiments, human iPSCs or human iCMs of the disclosure may be derived from a cultured stem cell line, an adult stem cell, a placental stem cell, or from another source of adult or embryonic stem cells that does not require the destruction of a human embryo. Delivery to a cell may be accomplished in vitro, as in laboratory procedures for transforming cells lines, or in vivo or ex vivo, as in the treatment of certain disease states. One mechanism for delivery is via viral infection where the expression construct is encapsidated in an infectious viral particle.

[0305] Several non-viral methods for the transfer of expression constructs into cultured mammalian cells also are contemplated by the present disclosure. These include calcium phosphate precipitation, DEAE-dextran, electroporation, direct microinjection, DNA-loaded liposomes and lipofectamine-DNA complexes, cell sonication, gene bombardment using high velocity microprojectiles, and receptor-mediated transfection. Some of these techniques may be successfully adapted for in vivo or ex vivo use.

[0306] Once the expression construct has been delivered into the cell the nucleic acid encoding the gene of interest may be positioned and expressed at different sites. In certain embodiments, the nucleic acid encoding the gene may be stably integrated into the genome of the cell. This integration may be in the cognate location and orientation via homologous recombination (gene replacement) or it may be integrated in a random, non-specific location (gene augmentation). In yet further embodiments, the nucleic acid may be stably maintained in the cell as a separate, episomal segment of DNA. Such nucleic acid segments or “episomes” encode sequences sufficient to permit maintenance and replication independent of or in synchronization with the host cell cycle. How the expression construct is delivered to a cell and where in the cell the nucleic acid remains is dependent on the type of expression construct employed.

[0307] In yet another embodiment, the expression construct may simply consist of naked recombinant DNA or plasmids. Transfer of the construct may be performed by any of the methods mentioned above which physically or chemically permeabilize the cell membrane. This is particularly applicable for transfer in vitro but it may be applied to in vivo use as well. Dubensky et al. (1984) successfully injected polyomavirus DNA in the form of calcium phosphate precipitates into liver and spleen of adult and newborn mice demonstrating active viral replication and acute infection. Benvenisty and Neshif (1986) also demonstrated that direct intraperitoneal injection of calcium phosphate-precipitated plasmids results in expression of the transfected genes. DNA encoding a gene of interest may also be transferred in a similar manner in vivo and express the gene product.

[0308] In still another embodiment for transferring a naked DNA expression construct into cells may involve particle bombardment. This method depends on the ability to accelerate DNA-coated microprojectiles to a high velocity allowing them to pierce cell membranes and enter cells without killing them. Several devices for accelerating small particles have been developed. One such device relies on a high voltage discharge to generate an electrical current, which in turn provides the motive force. The microprojectiles used have consisted of biologically inert substances such as tungsten or gold beads.

[0309] In some embodiments, the expression construct is delivered directly to the liver, skin, and/or muscle tissue of a subject. This may require surgical exposure of the tissue or cells, to eliminate any intervening tissue between the gun and the target organ, i.e., ex vivo treatment. Again, DNA encoding a particular gene may be delivered via this method and still be incorporated by the present disclosure.

[0310] In a further embodiment, the expression construct may be entrapped in a liposome. Liposomes are vesicular structures characterized by a phospholipid bilayer membrane and an inner aqueous medium. Multilamellar liposomes have multiple lipid layers separated by aqueous medium. They form spontaneously when phospholipids are suspended in an excess of aqueous solution. The lipid components undergo self-rearrangement before the formation of closed structures and entrap water and dissolved solutes between the lipid bilayers. Also contemplated are lipofectamine-DNA complexes.

[0311] Liposome-mediated nucleic acid delivery and expression of foreign DNA in vitro has been very successful. A reagent known as Lipofectamine 2000™ is widely used and commercially available.

[0312] In certain embodiments, the liposome may be complexed with a hemagglutinating virus (HVJ) to facilitate fusion with the cell membrane and promote cell entry of liposome-encapsulated DNA. In other embodiments, the liposome may be complexed or employed in conjunction with nuclear non-histone chromosomal proteins (HMG-1). In yet further embodiments, the liposome may be complexed or employed in conjunction with both HVJ and HMG-1. In that such expression constructs have been successfully employed in transfer and expression of nucleic acid in vitro and in vivo, then they are applicable for the present disclosure. Where a bacterial promoter is employed in the DNA construct, it also will be desirable to include within the liposome an appropriate bacterial polymerase.

[0313] Other expression constructs which can be employed to deliver a nucleic acid encoding a particular gene into cells are receptor-mediated delivery vehicles. These take advantage of the selective uptake of macromolecules by receptor-mediated endocytosis in almost all eukaryotic cells. Because of the cell type-specific distribution of various receptors, the delivery can be highly specific.

[0314] Receptor-mediated gene targeting vehicles generally consist of two components: a cell receptor-specific ligand and a DNA-binding agent. Several ligands have been used for receptor-mediated gene transfer. The most extensively characterized ligands are asialoorosomucoid (ASOR) and transferrin. A synthetic neoglycoprotein, which recognizes the same receptor as ASOR, has been used as a gene delivery vehicle and epidermal growth factor (EGF) has also been used to deliver genes to squamous carcinoma cells.

[0315] D. AAV-Cas9 Vectors

[0316] In some embodiments, a Cas9 may be packaged into an AAV vector. In some embodiments, the AAV vector is a wildtype AAV vector. In some embodiments, the AAV vector contains one or more mutations. In some embodiments, the AAV vector is isolated or derived from an AAV vector of serotype AAV1, AAV2, AAV3, AAV4, AAV5, AAV6, AAV7, AAV8, AAV9, AAV10, AAV11 or any combination thereof.

[0317] Exemplary AAV-Cas9 vectors contain two ITR (inverted terminal repeat) sequences which flank a central sequence region comprising the Cas9 sequence. In some embodiments, the ITRs are isolated or derived from an AAV vector of serotype AAV1, AAV2, AAV3, AAV4, AAV5, AAV6, AAV7, AAV8, AAV9, AAV10, AAV11 or any combination thereof. In some embodiments, the ITRs comprise or consist of full-length and/or wildtype sequences for an AAV serotype. In some embodiments, the ITRs comprise or consist of truncated sequences for an AAV serotype. In some embodiments, the ITRs comprise or consist of elongated sequences for an AAV serotype. In some embodiments, the ITRs comprise or consist of sequences comprising a sequence variation compared to a wildtype sequence for the same AAV serotype. In some embodiments, the sequence variation comprises one or more of a substitution, deletion, insertion, inversion, or transposition. In some embodiments, the ITRs comprise or consist of at least 100, 101, 102, 103, 104, 105, 106, 107, 108, 109, 110, 111, 112, 113, 114, 115, 116, 117, 118, 119, 120, 121, 122, 123, 124, 125, 126, 127, 128, 129, 130, 131, 132, 133, 134, 135, 136, 137, 138, 139, 140, 141, 142, 143, 144, 145, 146, 147, 148, 149 or 150 base pairs. In some embodiments, the ITRs comprise or consist of 100, 101, 102, 103, 104, 105, 106, 107, 108, 109, 110, 111, 112, 113, 114, 115, 116, 117, 118, 119, 120, 121, 122, 123, 124, 125, 126, 127, 128, 129, 130, 131, 132, 133, 134, 135, 136, 137, 138, 139, 140, 141, 142, 143, 144, 145, 146, 147, 148, 149 or 150 base pairs. In some embodiments, the ITRs have a length of 110±10 base pairs. In some embodiments, the ITRs have a length of 120±10 base pairs. In some embodiments, the ITRs have a length of 130±10 base pairs. In some embodiments, the ITRs have a length of 140±10 base pairs. In some embodiments, the ITRs have a length of 150±10 base pairs. In some embodiments, the ITRs have a length of 115, 145, or 141 base pairs. In some embodiments, the ITRs have a sequence selected from SEQ. ID. NO: 880, SEQ ID NO: 881, SEQ ID NO; 882, SEQ ID NO: 883 and SEQ ID. NO: 946.

[0318] In some embodiments, the AAV-Cas9 vector may contain one or more nuclear localization signals (NLS). In some embodiments, the AAV-Cas9 vector contains 1, 2, 3, 4, or 5 nuclear localization signals. Exemplary NLS include the c-myc NLS (SEQ ID NO: 884), the SV40 NLS (SEQ ID NO: 885), the hnRNPAI M9 NLS (SEQ ID NO: 886), the nucleoplasmin NLS (SEQ ID NO: 887), the sequence RMRKFKNKGKDTAELRRRRVEVSVELRKAKKDEQILKRRNV (SEQ ID NO: 888) of the IBB domain from importin-alpha, the sequences VSRKRPRP (SEQ ID NO: 889) and PPKKARED (SEQ ID NO: 890) of the myoma T protein, the sequence PQPKKKPL (SEQ ID NO: 891) of human p53, the sequence SALI AP (SEQ ID NO: 892) of mouse c-abl IV, the sequences DRLRR (SEQ ID NO: 893) and PKQKKRK (SEQ ID NO: 894) of the influenza virus NS1, the sequence RKLKKKIKKL (SEQ ID NO: 895) of the Hepatitis virus delta antigen and the sequence REKKKFLKRR (SEQ ID NO: 896) of the mouse Mx1 protein. Further acceptable nuclear localization signals include bipartite nuclear localization sequences such as the sequence KRKGDEVDGVDEVAKKKSKK (SEQ ID NO: 897) of the human poly(ADP-ribose) polymerase or the sequence RKCLQAGMNLEARKTKK (SEQ ID NO: 898) of the steroid hormone receptors (human) glucocorticoid.

[0319] In some embodiments, the AAV-Cas9 vector may comprise additional elements to facilitate packaging of the vector and expression of the Cas9. In some embodiments, the AAV-Cas9 vector may comprise a polyA sequence. In some embodiments, the polyA sequence may be a mini-polyA sequence. In some embodiments, the AAV-CAs9 vector may comprise a transposable element. In some embodiments, the AAV-Cas9 vector may comprise a regulator element. In some embodiments, the regulator element is an activator or a repressor.

[0320] In some embodiments, the AAV-Cas9 may contain one or more promoters. In some embodiments, the one or more promoters drive expression of the Cas9. In some embodiments, the one or more promoters are muscle-specific promoters. Exemplary muscle-specific promoters include myosin light chain-2 promoter, the α-actin promoter, the troponin 1 promoter, the Na+/Ca2+ exchanger promoter, the dystrophin promoter, the α7 integrin promoter, the brain natriuretic peptide promoter, the αB-crystallin/small heat shock protein promoter, a-myosin heavy chain promoter, the ANF promoter, the CK8 promoter and the CK8e promoter.

[0321] In some embodiments, the AAV-Cas9 vector may be optimized for production in yeast, bacteria, insect cells, or mammalian cells. In some embodiments, the AAV-Cas9 vector may be optimized for expression in human cells. In some embodiments, the AAV-Cas9 vector may be optimized for expression in a bacculovirus expression system.

[0322] In some embodiments, the AAV-Cas9 vector comprises a sequence selected from SEQ ID NO: 899, SEQ ID NO: 900, SEQ ID NO: 901, or SEQ ID NO: 902, as shown in Table 4.

TABLE 4
Exemplary gene editing constructs (from ITR to ITR
for delivery via AAV vector)

| SEQ | |
|---|---|
| ID | |
| NO: | Sequence |
| 899 | GGCCACTCCCTCTCTGCGCGCTCGCTCGCTCACTGAGGCCGGGCGACCA |
| | AAGGTCGCCCGACGCCCGGGCTTTGCCCGGGCGGCCTCAGTGAGCGAGC |
| | GAGCGCGCAGAGAGGGAGTGGCCAACTCCATCACTAGGGGTTCCTTGTA |
| | GTTAATGATTAACCCGCCATGCTACTTATCTACGTAGCCATGCTCTAGAT |
| | TAATTAATGCCCATGTAAGGAGGCAAGGCCTGGGGACACCCGAGATGCC |
| | TGGTTATAATTAACCCAGACATGTGGCTGCCCCCCCCCCCCCAACACCTG |
| | CTGCCTCTAAAAATAACCCTGCATGCCATGTTCCCGGCGAAGGGCCAGC |
| | TGTCCCCCGCCAGCTAGACTCAGCACTTAGTTTAGGAACCAGTGAGCAA |
| | GTCAGCCCTTGGGGCAGCCCATACAAGGCCATGGGGCTGGGCAAGCTGC |
| | ACGCCTGGGTCCGGGGTGGGCACGGTGCCCGGGCAACGAGCTGAAAGC |
| | TCATCTGCTCTCAGGGGCCCCTCCCTGGGGACAGCCCCTCCTGGCTAGTC |
| | ACACCCTGTAGGCTCCTCTATATAACCCAGGGGCACAGGGGCTGCCCTC |
| | ATTCTACCACCACCTCCACAGCACAGACAGACACTCAGGAGCCAGCCAG |
| | CGCTAGCGCCACCATGATGGCCCCAAAGAAGAAGCGGAAGGTCGGTAT |
| | CCACGGAGTCCCAGCAGCCGACAAGAAGTACAGCATCGGCCTGGACATC |
| | GGCACCAACTCTGTGGGCTGGGCCGTGATCACCGACGAGTACAAGGTGC |
| | CCAGCAAGAAATTCAAGGTGCTGGGCAACACCGACCGGCACAGCATCA |
| | AGAAGAACCTGATCGGAGCCCTGCTGTTCGACAGCGGCGAAACAGCCG |
| | AGGCCACCCGGCTGAAGAGAACCGCCAGAAGAAGATACACCAGACGGA |
| | AGAACCGGATCTGCTATCTGCAAGAGATCTTCAGCAACGAGATGGCCAA |
| | GGTGGACGACAGCTTCTTCCACAGACTGGAAGAGTCCTTCCTGGTGGAA |
| | GAGGATAAGAAGCACGAGCGGCACCCCATCTTCGGCAACATCGTGGAC |
| | GAGGTGGCCTACCACGAGAAGTACCCCACCATCTACCACCTGAGAAAGA |
| | AACTGGTGGACAGCACCGACAAGGCCGACCTGCGGCTGATCTATCTGGC |
| | CCTGGCCCACATGATCAAGTTCCGGGGCCACTTCCTGATCGAGGGCGAC |
| | CTGAACCCCGACAACAGCGACGTGGACAAGCTGTTCATCCAGCTGGTGC |
| | AGACCTACAACCAGCTGTTCGAGGAAAACCCCATCAACGCCAGCGGCGT |
| | GGACGCCAAGGCCATCCTGTCTGCCAGACTGAGCAAGAGCAGACGGCTG |
| | GAAAATCTGATCGCCCAGCTGCCCGGCGAGAAGAAGAATGGCCTGTTCG |
| | GCAACCTGATTGCCCTGAGCCTGGGCCTGACCCCCAACTTCAAGAGCAA |
| | CTTCGACCTGGCCGAGGATGCCAAACTGCAGCTGAGCAAGGACACCTAC |
| | GACGACGACCTGGACAACCTGCTGGCCCAGATCGGCGACCAGTACGCCG |
| | ACCTGTTTCTGGCCGCCAAGAACCTGTCCGACGCCATCCTGCTGAGCGA |
| | CATCCTGAGAGTGAACACCGAGATCACCAAGGCCCCCCTGAGCGCCTCT |
| | ATGATCAAGAGATACGACGAGCACCACCAGGACCTGACCCTGCTGAAA |
| | GCTCTCGTGCGGCAGCAGCTGCCTGAGAAGTACAAAGAGATTTTCTTCG |
| | ACCAGAGCAAGAACGGCTACGCCGGCTACATTGACGGCGGAGCCAGCC |
| | AGGAAGAGTTCTACAAGTTCATCAAGCCCATCCTGGAAAAGATGGACGG |
| | CACCGAGGAACTGCTCGTGAAGCTGAACAGAGAGGACCTGCTGCGGAA |
| | GCAGCGGACCTTCGACAACGGCAGCATCCCCCACCAGATCCACCTGGGA |
| | GAGCTGCACGCCATTCTGCGGCGGCAGGAAGATTTTTACCCATTCCTGA |
| | AGGACAACCGGGAAAAGATCGAGAAGATCCTGACCTTCCGCATCCCCTA |
| | CTACGTGGGCCCTCTGGCCAGGGGAAACAGCAGATTCGCCTGGATGACC |
| | AGAAAGAGCGAGGAAACCATCACCCCCTGGAACTTCGAGGAAGTGGTG |
| | GACAAGGGCGCTTCCGCCCAGAGCTTCATCGAGCGGATGACCAACTTCG |
| | ATAAGAACCTGCCCAACGAGAAGGTGCTGCCCAAGCACAGCCTGCTGTA |
| | CGAGTACTTCACCGTGTATAACGAGCTGACCAAAGTGAAATACGTGACC |
| | GAGGGAATGAGAAAGCCCGCCTTCCTGAGCGGCGAGCAGAAAAAGGCC |
| | ATCGTGGACCTGCTGTTCAAGACCAACCGGAAAGTGACCGTGAAGCAGC |
| | TGAAAGAGGACTACTTCAAGAAAATCGAGTGCTTCGACTCCGTGGAAAT |
| | CTCCGGCGTGGAAGATCGGTTCAACGCCTCCCTGGGCACATACCACGAT |
| | CTGCTGAAAATTATCAAGGACAAGGACTTCCTGGACAATGAGGAAAACG |
| | AGGACATTCTGGAAGATATCGTGCTGACCCTGACACTGTTTGAGGACAG |
| | AGAGATGATCGAGGAACGGCTGAAAACCTATGCCCACCTGTTCGACGAC |
| | AAAGTGATGAAGCAGCTGAAGCGGCGGAGATACACCGGCTGGGGCAGG |
| | CTGAGCCGGAAGCTGATCAACGGCATCCGGGACAAGCAGTCCGGCAAG |
| | ACAATCCTGGATTTCCTGAAGTCCGACGGCTTCGCCAACAGAAACTTCA |
| | TGCAGCTGATCCACGACGACAGCCTGACCTTTAAAGAGGACATCCAGAA |
| | AGCCCAGGTGTCCGGCCAGGGCGATAGCCTGCACGAGCACATTGCCAAT |
| | CTGGCCGGCAGCCCCGCCATTAAGAAGGGCATCCTGCAGACAGTGAAGG |
| | TGGTGGACGAGCTCGTGAAAGTGATGGGCCGGCACAAGCCCGAGAACA |
| | TCGTGATCGAAATGGCCAGAGAGAACCAGACCACCCAGAAGGGACAGA |
| | AGAACAGCCGCGAGAGAATGAAGCGGATCGAAGAGGGCATCAAAGAGC |
| | TGGGCAGCCAGATCCTGAAAGAACACCCCGTGGAAAACACCCAGCTGC |
| | AGAACGAGAAGCTGTACCTGTACTACCTGCAGAATGGGCGGGATATGTA |
| | CGTGGACCAGGAACTGGACATCAACCGGCTGTCCGACTACGATGTGGAC |
| | CATATCGTGCCTCAGAGCTTTCTGAAGGACGACTCCATCGACAACAAGG |
| | TGCTGACCAGAAGCGACAAGAACCGGGGCAAGAGCGACAACGTGCCCT |
| | CCGAAGAGGTCGTGAAGAAGATGAAGAACTACTGGCGGCAGCTGCTGA |
| | ACGCCAAGCTGATTACCCAGAGAAAGTTCGACAATCTGACCAAGGCCGA |
| | GAGAGGCGGCCTGAGCGAACTGGATAAGGCCGGCTTCATCAAGAGACA |
| | GCTGGTGGAAACCCGGCAGATCACAAAGCACGTGGCACAGATCCTGGA |
| | CTCCCGGATGAACACTAAGTACGACGAGAATGACAAGCTGATCCGGGA |
| | AGTGAAAGTGATCACCCTGAAGTCCAAGCTGGTGTCCGATTTCCGGAAG |
| | GATTTCCAGTTTTACAAAGTGCGCGAGATCAACAACTACCACCACGCCC |
| | ACGACGCCTACCTGAACGCCGTCGTGGGAACCGCCCTGATCAAAAAGTA |
| | CCCTAAGCTGGAAAGCGAGTTCGTGTACGGCGACTACAAGGTGTACGAC |
| | GTGCGGAAGATGATCGCCAAGAGCGAGCAGGAAATCGGCAAGGCTACC |
| | GCCAAGTACTTCTTCTACAGCAACATCATGAACTTTTTCAAGACCGAGAT |
| | TACCCTGGCCAACGGCGAGATCCGGAAGCGGCCTCTGATCGAGACAAAC |
| | GGCGAAACCGGGGAGATCGTGTGGGATAAGGGCCGGGATTTTGCCACC |
| | GTGCGGAAAGTGCTGAGCATGCCCCAAGTGAATATCGTGAAAAAGACC |
| | GAGGTGCAGACAGGCGGCTTCAGCAAAGAGTCTATCCTGCCCAAGAGG |
| | AACAGCGATAAGCTGATCGCCAGAAAGAAGGACTGGGACCCTAAGAAG |
| | TACGGCGGCTTCGACAGCCCCACCGTGGCCTATTCTGTGCTGGTGGTGGC |
| | CAAAGTGGAAAAGGGCAAGTCCAAGAAACTGAAGAGTGTGAAAGAGCT |
| | GCTGGGGATCACCATCATGGAAAGAAGCAGCTTCGAGAAGAATCCCATC |
| | GACTTTCTGGAAGCCAAGGGCTACAAAGAAGTGAAAAAGGACCTGATC |
| | ATCAAGCTGCCTAAGTACTCCCTGTTCGAGCTGGAAAACGGCCGGAAGA |
| | GAATGCTGGCCTCTGCCGGCGAACTGCAGAAGGGAAACGAACTGGCCCT |
| | GCCCTCCAAATATGTGAACTTCCTGTACCTGGCCAGCCACTATGAGAAG |
| | CTGAAGGGCTCCCCCGAGGATAATGAGCAGAAACAGCTGTTTGTGGAAC |
| | AGCACAAGCACTACCTGGACGAGATCATCGAGCAGATCAGCGAGTTCTC |
| | CAAGAGAGTGATCCTGGCCGACGCTAATCTGGACAAAGTGCTGTCCGCC |
| | TACAACAAGCACCGGGATAAGCCCATCAGAGAGCAGGCCGAGAATATC |
| | ATCCACCTGTTTACCCTGACCAATCTGGGAGCCCCTGCCGCCTTCAAGTA |
| | CTTTGACACCACCATCGACCGGAAGAGGTACACCAGCACCAAAGAGGTG |
| | CTGGACGCCACCCTGATCCACCAGAGCATCACCGGCCTGTACGAGACAC |
| | GGATCGACCTGTCTCAGCTGGGAGGCGACAAGCGTCCTGCTGCTACTAA |
| | GAAAGCTGGTCAAGCTAAGAAAAAGAAATGAATCGATTAGCAATAAAG |
| | GATCGTTTATTTTCATTGGAAGCGTGTGTTGGTTTTTTGATCAGGCGCGG |
| | GTACCAGGTCGCGGCCGCTCTAGAGCATGGCTACGTAGATAAGTAGCAT |
| | GGCGGGTTAATCATTAACTACAAGGAACCCCTAGTGATGGAGTTGGCCA |
| | CTCCCTCTCTGCGCGCTCGCTCGCTCACTGAGGCCGGGCGACCAAAGGT |
| | CGCCCGACGCCCGGGCTTTGCCCGGGCGGCCTCAGTGAGCGAGCGAGCG |
| | CGCAGAGAGGGA |
| 900 | CCTGCAGGCAGCTGCGCGCTCGCTCGCTCACTGAGGCCGCCCGGGCAAA |
| | GCCCGGGCGTCGGGCGACCTTTGGTCGCCCGGCCTCAGTGAGCGAGCGA |
| | GCGCGCAGAGAGGGAGTGGCCAACTCCATCACTAGGGGTTCCTGTGGCC |
| | AACTCCATCACTAGGGGTTCCTTGTAGTTAATGATTAACCCGCCATGCTA |
| | CTTATCTACGTAGCCATGCTCTAGATTAATTAATGCCCATGTAAGGAGGC |
| | AAGGCCTGGGGACACCCGAGATGCCTGGTTATAATTAACCCAGACATGT |
| | GGCTGCCCCCCCCCCCCCAACACCTGCTGCCTCTAAAAATAACCCTGCAT |
| | GCCATGTTCCCGGCGAAGGGCCAGCTGTCCCCCGCCAGCTAGACTCAGC |
| | ACTTAGTTTAGGAACCAGTGAGCAAGTCAGCCCTTGGGGCAGCCCATAC |
| | AAGGCCATGGGGCTGGGCAAGCTGCACGCCTGGGTCCGGGGTGGGCAC |
| | GGTGCCCGGGCAACGAGCTGAAAGCTCATCTGCTCTCAGGGGCCCCTCC |
| | CTGGGGACAGCCCCTCCTGGCTAGTCACACCCTGTAGGCTCCTCTATATA |
| | ACCCAGGGGCACAGGGGCTGCCCTCATTCTACCACCACCTCCACAGCAC |
| | AGACAGACACTCAGGAGCCAGCCAGCGCTAGCGCCACCATGATGGCCCC |
| | AAAGAAGAAGCGGAAGGTCGGTATCCACGGAGTCCCAGCAGCCGACAA |
| | GAAGTACAGCATCGGCCTGGACATCGGCACCAACTCTGTGGGCTGGGCC |
| | GTGATCACCGACGAGTACAAGGTGCCCAGCAAGAAATTCAAGGTGCTGG |
| | GCAACACCGACCGGCACAGCATCAAGAAGAACCTGATCGGAGCCCTGCT |
| | GTTCGACAGCGGCGAAACAGCCGAGGCCACCCGGCTGAAGAGAACCGC |
| | CAGAAGAAGATACACCAGACGGAAGAACCGGATCTGCTATCTGCAAGA |
| | GATCTTCAGCAACGAGATGGCCAAGGTGGACGACAGCTTCTTCCACAGA |
| | CTGGAAGAGTCCTTCCTGGTGGAAGAGGATAAGAAGCACGAGCGGCAC |
| | CCCATCTTCGGCAACATCGTGGACGAGGTGGCCTACCACGAGAAGTACC |
| | CCACCATCTACCACCTGAGAAAGAAACTGGTGGACAGCACCGACAAGG |
| | CCGACCTGCGGCTGATCTATCTGGCCCTGGCCCACATGATCAAGTTCCGG |
| | GGCCACTTCCTGATCGAGGGCGACCTGAACCCCGACAACAGCGACGTGG |
| | ACAAGCTGTTCATCCAGCTGGTGCAGACCTACAACCAGCTGTTCGAGGA |
| | AAACCCCATCAACGCCAGCGGCGTGGACGCCAAGGCCATCCTGTCTGCC |
| | AGACTGAGCAAGAGCAGACGGCTGGAAAATCTGATCGCCCAGCTGCCC |
| | GGCGAGAAGAAGAATGGCCTGTTCGGCAACCTGATTGCCCTGAGCCTGG |
| | GCCTGACCCCCAACTTCAAGAGCAACTTCGACCTGGCCGAGGATGCCAA |
| | ACTGCAGCTGAGCAAGGACACCTACGACGACGACCTGGACAACCTGCTG |
| | GCCCAGATCGGCGACCAGTACGCCGACCTGTTTCTGGCCGCCAAGAACC |
| | TGTCCGACGCCATCCTGCTGAGCGACATCCTGAGAGTGAACACCGAGAT |
| | CACCAAGGCCCCCCTGAGCGCCTCTATGATCAAGAGATACGACGAGCAC |
| | CACCAGGACCTGACCCTGCTGAAAGCTCTCGTGCGGCAGCAGCTGCCTG |
| | AGAAGTACAAAGAGATTTTCTTCGACCAGAGCAAGAACGGCTACGCCGG |
| | CTACATTGACGGCGGAGCCAGCCAGGAAGAGTTCTACAAGTTCATCAAG |
| | CCCATCCTGGAAAAGATGGACGGCACCGAGGAACTGCTCGTGAAGCTGA |
| | ACAGAGAGGACCTGCTGCGGAAGCAGCGGACCTTCGACAACGGCAGCA |
| | TCCCCCACCAGATCCACCTGGGAGAGCTGCACGCCATTCTGCGGCGGCA |
| | GGAAGATTTTTACCCATTCCTGAAGGACAACCGGGAAAAGATCGAGAAG |
| | ATCCTGACCTTCCGCATCCCCTACTACGTGGGCCCTCTGGCCAGGGGAA |
| | ACAGCAGATTCGCCTGGATGACCAGAAAGAGCGAGGAAACCATCACCC |
| | CCTGGAACTTCGAGGAAGTGGTGGACAAGGGCGCTTCCGCCCAGAGCTT |
| | CATCGAGCGGATGACCAACTTCGATAAGAACCTGCCCAACGAGAAGGTG |
| | CTGCCCAAGCACAGCCTGCTGTACGAGTACTTCACCGTGTATAACGAGC |
| | TGACCAAAGTGAAATACGTGACCGAGGGAATGAGAAAGCCCGCCTTCCT |
| | GAGCGGCGAGCAGAAAAAGGCCATCGTGGACCTGCTGTTCAAGACCAA |
| | CCGGAAAGTGACCGTGAAGCAGCTGAAAGAGGACTACTTCAAGAAAAT |
| | CGAGTGCTTCGACTCCGTGGAAATCTCCGGCGTGGAAGATCGGTTCAAC |
| | GCCTCCCTGGGCACATACCACGATCTGCTGAAAATTATCAAGGACAAGG |
| | ACTTCCTGGACAATGAGGAAAACGAGGACATTCTGGAAGATATCGTGCT |
| | GACCCTGACACTGTTTGAGGACAGAGAGATGATCGAGGAACGGCTGAA |
| | AACCTATGCCCACCTGTTCGACGACAAAGTGATGAAGCAGCTGAAGCGG |
| | CGGAGATACACCGGCTGGGGCAGGCTGAGCCGGAAGCTGATCAACGGC |
| | ATCCGGGACAAGCAGTCCGGCAAGACAATCCTGGATTTCCTGAAGTCCG |
| | ACGGCTTCGCCAACAGAAACTTCATGCAGCTGATCCACGACGACAGCCT |
| | GACCTTTAAAGAGGACATCCAGAAAGCCCAGGTGTCCGGCCAGGGCGAT |
| | AGCCTGCACGAGCACATTGCCAATCTGGCCGGCAGCCCCGCCATTAAGA |
| | AGGGCATCCTGCAGACAGTGAAGGTGGTGGACGAGCTCGTGAAAGTGA |
| | TGGGCCGGCACAAGCCCGAGAACATCGTGATCGAAATGGCCAGAGAGA |
| | ACCAGACCACCCAGAAGGGACAGAAGAACAGCCGCGAGAGAATGAAGC |
| | GGATCGAAGAGGGCATCAAAGAGCTGGGCAGCCAGATCCTGAAAGAAC |
| | ACCCCGTGGAAAACACCCAGCTGCAGAACGAGAAGCTGTACCTGTACTA |
| | CCTGCAGAATGGGCGGGATATGTACGTGGACCAGGAACTGGACATCAAC |
| | CGGCTGTCCGACTACGATGTGGACCATATCGTGCCTCAGAGCTTTCTGAA |
| | GGACGACTCCATCGACAACAAGGTGCTGACCAGAAGCGACAAGAACCG |
| | GGGCAAGAGCGACAACGTGCCCTCCGAAGAGGTCGTGAAGAAGATGAA |
| | GAACTACTGGCGGCAGCTGCTGAACGCCAAGCTGATTACCCAGAGAAAG |
| | TTCGACAATCTGACCAAGGCCGAGAGAGGCGGCCTGAGCGAACTGGAT |
| | AAGGCCGGCTTCATCAAGAGACAGCTGGTGGAAACCCGGCAGATCACA |
| | AAGCACGTGGCACAGATCCTGGACTCCCGGATGAACACTAAGTACGACG |
| | AGAATGACAAGCTGATCCGGGAAGTGAAAGTGATCACCCTGAAGTCCA |
| | AGCTGGTGTCCGATTTCCGGAAGGATTTCCAGTTTTACAAAGTGCGCGA |
| | GATCAACAACTACCACCACGCCCACGACGCCTACCTGAACGCCGTCGTG |
| | GGAACCGCCCTGATCAAAAAGTACCCTAAGCTGGAAAGCGAGTTCGTGT |
| | ACGGCGACTACAAGGTGTACGACGTGCGGAAGATGATCGCCAAGAGCG |
| | AGCAGGAAATCGGCAAGGCTACCGCCAAGTACTTCTTCTACAGCAACAT |
| | CATGAACTTTTTCAAGACCGAGATTACCCTGGCCAACGGCGAGATCCGG |
| | AAGCGGCCTCTGATCGAGACAAACGGCGAAACCGGGGAGATCGTGTGG |
| | GATAAGGGCCGGGATTTTGCCACCGTGCGGAAAGTGCTGAGCATGCCCC |
| | AAGTGAATATCGTGAAAAAGACCGAGGTGCAGACAGGCGGCTTCAGCA |
| | AAGAGTCTATCCTGCCCAAGAGGAACAGCGATAAGCTGATCGCCAGAA |
| | AGAAGGACTGGGACCCTAAGAAGTACGGCGGCTTCGACAGCCCCACCGT |
| | GGCCTATTCTGTGCTGGTGGTGGCCAAAGTGGAAAAGGGCAAGTCCAAG |
| | AAACTGAAGAGTGTGAAAGAGCTGCTGGGGATCACCATCATGGAAAGA |
| | AGCAGCTTCGAGAAGAATCCCATCGACTTTCTGGAAGCCAAGGGCTACA |
| | AAGAAGTGAAAAAGGACCTGATCATCAAGCTGCCTAAGTACTCCCTGTT |
| | CGAGCTGGAAAACGGCCGGAAGAGAATGCTGGCCTCTGCCGGCGAACT |
| | GCAGAAGGGAAACGAACTGGCCCTGCCCTCCAAATATGTGAACTTCCTG |
| | TACCTGGCCAGCCACTATGAGAAGCTGAAGGGCTCCCCCGAGGATAATG |
| | AGCAGAAACAGCTGTTTGTGGAACAGCACAAGCACTACCTGGACGAGAT |
| | CATCGAGCAGATCAGCGAGTTCTCCAAGAGAGTGATCCTGGCCGACGCT |
| | AATCTGGACAAAGTGCTGTCCGCCTACAACAAGCACCGGGATAAGCCCA |
| | TCAGAGAGCAGGCCGAGAATATCATCCACCTGTTTACCCTGACCAATCT |
| | GGGAGCCCCTGCCGCCTTCAAGTACTTTGACACCACCATCGACCGGAAG |
| | AGGTACACCAGCACCAAAGAGGTGCTGGACGCCACCCTGATCCACCAGA |
| | GCATCACCGGCCTGTACGAGACACGGATCGACCTGTCTCAGCTGGGAGG |
| | CGACAAGCGTCCTGCTGCTACTAAGAAAGCTGGTCAAGCTAAGAAAAAG |
| | AAATGAATCGATTAGCAATAAAGGATCGTTTATTTTCATTGGAAGCGTG |
| | TGTTGGTTTTTTGATCAGGCGCGGGTACCAGGTCGCGGCCGCTCTAGAGC |
| | ATGGCTACGTAGATAAGTAGCATGGCGGGTTAATCATTAACTACAAGGA |
| | ACCCCTAGTGATGGAGTTAGGAACCCCTAGTGATGGAGTTGGCCACTCC |
| | CTCTCTGCGCGCTCGCTCGCTCACTGAGGCCGGGCGACCAAAGGTCGCC |
| | CGACGCCCGGGCTTTGCCCGGGCGGCCTCAGTGAGCGAGCGAGCGCGCA |
| | GCTGCCTGCAGG |
| 901 | AAGATGACGGTTTGTCACATGGAGTTGGCAGGATGTTTGATTAAAAACA |
| | TAACAGGAAGAAAAATGCCCCGCTGTGGGCGGACAAAATAGTTGGGAA |
| | CTGGGAGGGGTGGAAATGGAGTTTTTAAGGATTATTTAGGGAAGAGTGA |
| | CAAAATAGATGGGAACTGGGTGTAGCGTCGTAAGCTAATACGAAAATTA |
| | AAAATGACAAAATAGTTTGGAACTAGATTTCACTTATCTGGTTCGGATCT |
| | CCTAGGCGATATCAGTGATCAcggatctcgaccaattgacattattgaagcaACTAGTATCG |
| | ATtttatcagggttattgtctcagaCCTGCAGGCAGCTGCGCGCTCGCTCGCTCACTGA |
| | GGCCGCCCGGGCAAAGCCCGGGCGTCGGGCGACCTTTGGTCGCCCGGCC |
| | TCAGTGAGCGAGCGAGCGCGCAGAGAGGGAGTGGCCAACTCCATCACT |
| | AGGGGTTCCTGTGGCCAACTCCATCACTAGGGGTTCCTTGTAGTTAATGA |
| | TTAACCCGCCATGCTACTTATCTACGTAGCCATGCTCTAGATTAATTAAT |
| | GCCCATGTAAGGAGGCAAGGCCTGGGGACACCCGAGATGCCTGGTTATA |
| | ATTAACCCAGACATGTGGCTGCCCCCCCCCCCCCAACACCTGCTGCCTCT |
| | AAAAATAACCCTGCATGCCATGTTCCCGGCGAAGGGCCAGCTGTCCCCC |
| | GCCAGCTAGACTCAGCACTTAGTTTAGGAACCAGTGAGCAAGTCAGCCC |
| | TTGGGGCAGCCCATACAAGGCCATGGGGCTGGGCAAGCTGCACGCCTGG |
| | GTCCGGGGTGGGCACGGTGCCCGGGCAACGAGCTGAAAGCTCATCTGCT |
| | CTCAGGGGCCCCTCCCTGGGGACAGCCCCTCCTGGCTAGTCACACCCTGT |
| | AGGCTCCTCTATATAACCCAGGGGCACAGGGGCTGCCCTCATTCTACCA |
| | CCACCTCCACAGCACAGACAGACACTCAGGAGCCAGCCAGCGCTAGCGC |
| | CACCATGATGGCCCCAAAGAAGAAGCGGAAGGTCGGTATCCACGGAGT |
| | CCCAGCAGCCGACAAGAAGTACAGCATCGGCCTGGACATCGGCACCAA |
| | CTCTGTGGGCTGGGCCGTGATCACCGACGAGTACAAGGTGCCCAGCAAG |
| | AAATTCAAGGTGCTGGGCAACACCGACCGGCACAGCATCAAGAAGAAC |
| | CTGATCGGAGCCCTGCTGTTCGACAGCGGCGAAACAGCCGAGGCCACCC |
| | GGCTGAAGAGAACCGCCAGAAGAAGATACACCAGACGGAAGAACCGGA |
| | TCTGCTATCTGCAAGAGATCTTCAGCAACGAGATGGCCAAGGTGGACGA |
| | CAGCTTCTTCCACAGACTGGAAGAGTCCTTCCTGGTGGAAGAGGATAAG |
| | AAGCACGAGCGGCACCCCATCTTCGGCAACATCGTGGACGAGGTGGCCT |
| | ACCACGAGAAGTACCCCACCATCTACCACCTGAGAAAGAAACTGGTGGA |
| | CAGCACCGACAAGGCCGACCTGCGGCTGATCTATCTGGCCCTGGCCCAC |
| | ATGATCAAGTTCCGGGGCCACTTCCTGATCGAGGGCGACCTGAACCCCG |
| | ACAACAGCGACGTGGACAAGCTGTTCATCCAGCTGGTGCAGACCTACAA |
| | CCAGCTGTTCGAGGAAAACCCCATCAACGCCAGCGGCGTGGACGCCAAG |
| | GCCATCCTGTCTGCCAGACTGAGCAAGAGCAGACGGCTGGAAAATCTGA |
| | TCGCCCAGCTGCCCGGCGAGAAGAAGAATGGCCTGTTCGGCAACCTGAT |
| | TGCCCTGAGCCTGGGCCTGACCCCCAACTTCAAGAGCAACTTCGACCTG |
| | GCCGAGGATGCCAAACTGCAGCTGAGCAAGGACACCTACGACGACGAC |
| | CTGGACAACCTGCTGGCCCAGATCGGCGACCAGTACGCCGACCTGTTTC |
| | TGGCCGCCAAGAACCTGTCCGACGCCATCCTGCTGAGCGACATCCTGAG |
| | AGTGAACACCGAGATCACCAAGGCCCCCCTGAGCGCCTCTATGATCAAG |
| | AGATACGACGAGCACCACCAGGACCTGACCCTGCTGAAAGCTCTCGTGC |
| | GGCAGCAGCTGCCTGAGAAGTACAAAGAGATTTTCTTCGACCAGAGCAA |
| | GAACGGCTACGCCGGCTACATTGACGGCGGAGCCAGCCAGGAAGAGTT |
| | CTACAAGTTCATCAAGCCCATCCTGGAAAAGATGGACGGCACCGAGGAA |
| | CTGCTCGTGAAGCTGAACAGAGAGGACCTGCTGCGGAAGCAGCGGACCT |
| | TCGACAACGGCAGCATCCCCCACCAGATCCACCTGGGAGAGCTGCACGC |
| | CATTCTGCGGCGGCAGGAAGATTTTTACCCATTCCTGAAGGACAACCGG |
| | GAAAAGATCGAGAAGATCCTGACCTTCCGCATCCCCTACTACGTGGGCC |
| | CTCTGGCCAGGGGAAACAGCAGATTCGCCTGGATGACCAGAAAGAGCG |
| | AGGAAACCATCACCCCCTGGAACTTCGAGGAAGTGGTGGACAAGGGCG |
| | CTTCCGCCCAGAGCTTCATCGAGCGGATGACCAACTTCGATAAGAACCT |
| | GCCCAACGAGAAGGTGCTGCCCAAGCACAGCCTGCTGTACGAGTACTTC |
| | ACCGTGTATAACGAGCTGACCAAAGTGAAATACGTGACCGAGGGAATG |
| | AGAAAGCCCGCCTTCCTGAGCGGCGAGCAGAAAAAGGCCATCGTGGAC |
| | CTGCTGTTCAAGACCAACCGGAAAGTGACCGTGAAGCAGCTGAAAGAG |
| | GACTACTTCAAGAAAATCGAGTGCTTCGACTCCGTGGAAATCTCCGGCG |
| | TGGAAGATCGGTTCAACGCCTCCCTGGGCACATACCACGATCTGCTGAA |
| | AATTATCAAGGACAAGGACTTCCTGGACAATGAGGAAAACGAGGACAT |
| | TCTGGAAGATATCGTGCTGACCCTGACACTGTTTGAGGACAGAGAGATG |
| | ATCGAGGAACGGCTGAAAACCTATGCCCACCTGTTCGACGACAAAGTGA |
| | TGAAGCAGCTGAAGCGGCGGAGATACACCGGCTGGGGCAGGCTGAGCC |
| | GGAAGCTGATCAACGGCATCCGGGACAAGCAGTCCGGCAAGACAATCC |
| | TGGATTTCCTGAAGTCCGACGGCTTCGCCAACAGAAACTTCATGCAGCT |
| | GATCCACGACGACAGCCTGACCTTTAAAGAGGACATCCAGAAAGCCCAG |
| | GTGTCCGGCCAGGGCGATAGCCTGCACGAGCACATTGCCAATCTGGCCG |
| | GCAGCCCCGCCATTAAGAAGGGCATCCTGCAGACAGTGAAGGTGGTGG |
| | ACGAGCTCGTGAAAGTGATGGGCCGGCACAAGCCCGAGAACATCGTGA |
| | TCGAAATGGCCAGAGAGAACCAGACCACCCAGAAGGGACAGAAGAACA |
| | GCCGCGAGAGAATGAAGCGGATCGAAGAGGGCATCAAAGAGCTGGGCA |
| | GCCAGATCCTGAAAGAACACCCCGTGGAAAACACCCAGCTGCAGAACG |
| | AGAAGCTGTACCTGTACTACCTGCAGAATGGGCGGGATATGTACGTGGA |
| | CCAGGAACTGGACATCAACCGGCTGTCCGACTACGATGTGGACCATATC |
| | GTGCCTCAGAGCTTTCTGAAGGACGACTCCATCGACAACAAGGTGCTGA |
| | CCAGAAGCGACAAGAACCGGGGCAAGAGCGACAACGTGCCCTCCGAAG |
| | AGGTCGTGAAGAAGATGAAGAACTACTGGCGGCAGCTGCTGAACGCCA |
| | AGCTGATTACCCAGAGAAAGTTCGACAATCTGACCAAGGCCGAGAGAG |
| | GCGGCCTGAGCGAACTGGATAAGGCCGGCTTCATCAAGAGACAGCTGGT |
| | GGAAACCCGGCAGATCACAAAGCACGTGGCACAGATCCTGGACTCCCG |
| | GATGAACACTAAGTACGACGAGAATGACAAGCTGATCCGGGAAGTGAA |
| | AGTGATCACCCTGAAGTCCAAGCTGGTGTCCGATTTCCGGAAGGATTTC |
| | CAGTTTTACAAAGTGCGCGAGATCAACAACTACCACCACGCCCACGACG |
| | CCTACCTGAACGCCGTCGTGGGAACCGCCCTGATCAAAAAGTACCCTAA |
| | GCTGGAAAGCGAGTTCGTGTACGGCGACTACAAGGTGTACGACGTGCGG |
| | AAGATGATCGCCAAGAGCGAGCAGGAAATCGGCAAGGCTACCGCCAAG |
| | TACTTCTTCTACAGCAACATCATGAACTTTTTCAAGACCGAGATTACCCT |
| | GGCCAACGGCGAGATCCGGAAGCGGCCTCTGATCGAGACAAACGGCGA |
| | AACCGGGGAGATCGTGTGGGATAAGGGCCGGGATTTTGCCACCGTGCGG |
| | AAAGTGCTGAGCATGCCCCAAGTGAATATCGTGAAAAAGACCGAGGTG |
| | CAGACAGGCGGCTTCAGCAAAGAGTCTATCCTGCCCAAGAGGAACAGC |
| | GATAAGCTGATCGCCAGAAAGAAGGACTGGGACCCTAAGAAGTACGGC |
| | GGCTTCGACAGCCCCACCGTGGCCTATTCTGTGCTGGTGGTGGCCAAAG |
| | TGGAAAAGGGCAAGTCCAAGAAACTGAAGAGTGTGAAAGAGCTGCTGG |
| | GGATCACCATCATGGAAAGAAGCAGCTTCGAGAAGAATCCCATCGACTT |
| | TCTGGAAGCCAAGGGCTACAAAGAAGTGAAAAAGGACCTGATCATCAA |
| | GCTGCCTAAGTACTCCCTGTTCGAGCTGGAAAACGGCCGGAAGAGAATG |
| | CTGGCCTCTGCCGGCGAACTGCAGAAGGGAAACGAACTGGCCCTGCCCT |
| | CCAAATATGTGAACTTCCTGTACCTGGCCAGCCACTATGAGAAGCTGAA |
| | GGGCTCCCCCGAGGATAATGAGCAGAAACAGCTGTTTGTGGAACAGCAC |
| | AAGCACTACCTGGACGAGATCATCGAGCAGATCAGCGAGTTCTCCAAGA |
| | GAGTGATCCTGGCCGACGCTAATCTGGACAAAGTGCTGTCCGCCTACAA |
| | CAAGCACCGGGATAAGCCCATCAGAGAGCAGGCCGAGAATATCATCCA |
| | CCTGTTTACCCTGACCAATCTGGGAGCCCCTGCCGCCTTCAAGTACTTTG |
| | ACACCACCATCGACCGGAAGAGGTACACCAGCACCAAAGAGGTGCTGG |
| | ACGCCACCCTGATCCACCAGAGCATCACCGGCCTGTACGAGACACGGAT |
| | CGACCTGTCTCAGCTGGGAGGCGACAAGCGTCCTGCTGCTACTAAGAAA |
| | GCTGGTCAAGCTAAGAAAAAGAAATGAATCGATTAGCAATAAAGGATC |
| | GTTTATTTTCATTGGAAGCGTGTGTTGGTTTTTTGATCAGGCGCGGGTAC |
| | CAGGTCGCGGCCGCTCTAGAGCATGGCTACGTAGATAAGTAGCATGGCG |
| | GGTTAATCATTAACTACAAGGAACCCCTAGTGATGGAGTTaggaacccctagtga |
| | tggagttggccactccctctctgcgcgctcgctcgctcactgaggccgggcga |
| | ccaaaggtcgcccgacgcccgggctttgcccgggcggcctcagtgagcgagc |
| | gagcgcgcagctgcctgcaggCATGCAAGCTGTAGCCAA |
| | CCACTAGAACTATAGCTAGAGTCCTGGGCGAACAAACGATGCTCGCCTT |
| | CCAGAAAACCGAGGATGCGAACCACTTCATCCGGGGTCAGCACCACCGG |
| | CAAGCGCCGCGACGGCCGAGGTCTTCCGATCTCCTGAAGCCAGGGCAGA |
| | TCCGTGCACAGCACCTTGCCGTAGAAGAACAGCAAGGCCGCCAATGCCT |
| | GACGATGCGTGGAGACCGAAACCTTGCGCTCGTTCGCCAGCCAGGACAG |
| | AAATGCCTCGACTTCGCTGCTGCCCAAGGTTGCCGGGTGACGCACACCG |
| | TGGAAACGGATGAAGGCACGAACCCAGTTGACATAAGCCTGTTCGGTTC |
| | GTAAACTGTAATGCAAGTAGCGTATGCGCTCACGCAACTGGTCCAGAAC |
| | CTTGACCGAACGCAGCGGTGGTAACGGCGCAGTGGCGGTTTTCATGGCT |
| | TGTTATGACTGTTTTTTTGTACAGTCTATGCCTCGGGCATCCAAGCAGCA |
| | AGCGCGTTACGCCGTGGGTCGATGTTTGATGTTATGGAGCAGCAACGAT |
| | GTTACGCAGCAGCAACGATGTTACGCAGCAGGGCAGTCGCCCTAAAACA |
| | AAGTTAGGTGGCTCAAGTATGGGCATCATTCGCACATGTAGGCTCGGCC |
| | CTGACCAAGTCAAATCCATGCGGGCTGCTCTTGATCTTTTCGGTCGTGAG |
| | TTCGGAGACGTAGCCACCTACTCCCAACATCAGCCGGACTCCGATTACC |
| | TCGGGAACTTGCTCCGTAGTAAGACATTCATCGCGCTTGCTGCCTTCGAC |
| | CAAGAAGCGGTTGTTGGCGCTCTCGCGGCTTACGTTCTGCCCAAGTTTGA |
| | GCAGCCGCGTAGTGAGATCTATATCTATGATCTCGCAGTCTCCGGCGAG |
| | CACCGGAGGCAGGGCATTGCCACCGCGCTCATCAATCTCCTCAAGCATG |
| | AGGCCAACGCGCTTGGTGCTTATGTGATCTACGTGCAAGCAGATTACGG |
| | TGACGATCCCGCAGTGGCTCTCTATACAAAGTTGGGCATACGGGAAGAA |
| | GTGATGCACTTTGATATCGACCCAAGTACCGCCACCTAACAATTCGTTCA |
| | AGCCGAGATCGGCTTCCCGGCCGCGGAGTTGTTCGGTAAATTGTCACAA |
| | CGCCGCGAATATAGTCTTTACCATGCCCTTGGCCACGCCCCTCTTTAATA |
| | CGACGGGCAATTTGCACTTCAGAAAATGAAGAGTTTGCTTTAGCCATAA |
| | CAAAAGTCCAGTATGCTTTTTCACAGCATAACTGGACTGATTTCAGTTTA |
| | CAACTATTCTGTCTAGTTTAAGACTTTATTGTCATAGTTTAGATCTATTTT |
| | GTTCAGTTTAAGACTTTATTGTCCGCCCACACCCGCTTACGC |
| 902 | AAGATGACGGTTTGTCACATGGAGTTGGCAGGATGTTTGATTAAAAACA |
| | TAACAGGAAGAAAAATGCCCCGCTGTGGGCGGACAAAATAGTTGGGAA |
| | CTGGGAGGGGTGGAAATGGAGTTTTTAAGGATTATTTAGGGAAGAGTGA |
| | CAAAATAGATGGGAACTGGGTGTAGCGTCGTAAGCTAATACGAAAATTA |
| | AAAATGACAAAATAGTTTGGAACTAGATTTCACTTATCTGGTTCGGATCT |
| | CCTAGGCGATATCAGTGATCAcggatctcgaccaattgacattattgaagcaACTAGTATCG |
| | ATtttatcagggttattgtctcagaGGCCACTCCCTCTCTGCGCGCTCGCTCGCTCACTG |
| | AGGCCGGGCGACCAAAGGTCGCCCGACGCCCGGGCTTTGCCCGGGCGGC |
| | CTCAGTGAGCGAGCGAGCGCGCAGAGAGGGAGTGGCCAACTCCATCAC |
| | TAGGGGTTCCTTGTAGTTAATGATTAACCCGCCATGCTACTTATCTACGT |
| | AGCCATGCTCTAGATTAATTAATGCCCATGTAAGGAGGCAAGGCCTGGG |
| | GACACCCGAGATGCCTGGTTATAATTAACCCAGACATGTGGCTGCCCCC |
| | CCCCCCCCAACACCTGCTGCCTCTAAAAATAACCCTGCATGCCATGTTCC |
| | CGGCGAAGGGCCAGCTGTCCCCCGCCAGCTAGACTCAGCACTTAGTTTA |
| | GGAACCAGTGAGCAAGTCAGCCCTTGGGGCAGCCCATACAAGGCCATG |
| | GGGCTGGGCAAGCTGCACGCCTGGGTCCGGGGTGGGCACGGTGCCCGG |
| | GCAACGAGCTGAAAGCTCATCTGCTCTCAGGGGCCCCTCCCTGGGGACA |
| | GCCCCTCCTGGCTAGTCACACCCTGTAGGCTCCTCTATATAACCCAGGGG |
| | CACAGGGGCTGCCCTCATTCTACCACCACCTCCACAGCACAGACAGACA |
| | CTCAGGAGCCAGCCAGCGCTAGCGCCACCATGATGGCCCCAAAGAAGA |
| | AGCGGAAGGTCGGTATCCACGGAGTCCCAGCAGCCGACAAGAAGTACA |
| | GCATCGGCCTGGACATCGGCACCAACTCTGTGGGCTGGGCCGTGATCAC |
| | CGACGAGTACAAGGTGCCCAGCAAGAAATTCAAGGTGCTGGGCAACAC |
| | CGACCGGCACAGCATCAAGAAGAACCTGATCGGAGCCCTGCTGTTCGAC |
| | AGCGGCGAAACAGCCGAGGCCACCCGGCTGAAGAGAACCGCCAGAAGA |
| | AGATACACCAGACGGAAGAACCGGATCTGCTATCTGCAAGAGATCTTCA |
| | GCAACGAGATGGCCAAGGTGGACGACAGCTTCTTCCACAGACTGGAAG |
| | AGTCCTTCCTGGTGGAAGAGGATAAGAAGCACGAGCGGCACCCCATCTT |
| | CGGCAACATCGTGGACGAGGTGGCCTACCACGAGAAGTACCCCACCATC |
| | TACCACCTGAGAAAGAAACTGGTGGACAGCACCGACAAGGCCGACCTG |
| | CGGCTGATCTATCTGGCCCTGGCCCACATGATCAAGTTCCGGGGCCACTT |
| | CCTGATCGAGGGCGACCTGAACCCCGACAACAGCGACGTGGACAAGCT |
| | GTTCATCCAGCTGGTGCAGACCTACAACCAGCTGTTCGAGGAAAACCCC |
| | ATCAACGCCAGCGGCGTGGACGCCAAGGCCATCCTGTCTGCCAGACTGA |
| | GCAAGAGCAGACGGCTGGAAAATCTGATCGCCCAGCTGCCCGGCGAGA |
| | AGAAGAATGGCCTGTTCGGCAACCTGATTGCCCTGAGCCTGGGCCTGAC |
| | CCCCAACTTCAAGAGCAACTTCGACCTGGCCGAGGATGCCAAACTGCAG |
| | CTGAGCAAGGACACCTACGACGACGACCTGGACAACCTGCTGGCCCAGA |
| | TCGGCGACCAGTACGCCGACCTGTTTCTGGCCGCCAAGAACCTGTCCGA |
| | CGCCATCCTGCTGAGCGACATCCTGAGAGTGAACACCGAGATCACCAAG |
| | GCCCCCCTGAGCGCCTCTATGATCAAGAGATACGACGAGCACCACCAGG |
| | ACCTGACCCTGCTGAAAGCTCTCGTGCGGCAGCAGCTGCCTGAGAAGTA |
| | CAAAGAGATTTTCTTCGACCAGAGCAAGAACGGCTACGCCGGCTACATT |
| | GACGGCGGAGCCAGCCAGGAAGAGTTCTACAAGTTCATCAAGCCCATCC |
| | TGGAAAAGATGGACGGCACCGAGGAACTGCTCGTGAAGCTGAACAGAG |
| | AGGACCTGCTGCGGAAGCAGCGGACCTTCGACAACGGCAGCATCCCCCA |
| | CCAGATCCACCTGGGAGAGCTGCACGCCATTCTGCGGCGGCAGGAAGAT |
| | TTTTACCCATTCCTGAAGGACAACCGGGAAAAGATCGAGAAGATCCTGA |
| | CCTTCCGCATCCCCTACTACGTGGGCCCTCTGGCCAGGGGAAACAGCAG |
| | ATTCGCCTGGATGACCAGAAAGAGCGAGGAAACCATCACCCCCTGGAAC |
| | TTCGAGGAAGTGGTGGACAAGGGCGCTTCCGCCCAGAGCTTCATCGAGC |
| | GGATGACCAACTTCGATAAGAACCTGCCCAACGAGAAGGTGCTGCCCAA |
| | GCACAGCCTGCTGTACGAGTACTTCACCGTGTATAACGAGCTGACCAAA |
| | GTGAAATACGTGACCGAGGGAATGAGAAAGCCCGCCTTCCTGAGCGGC |
| | GAGCAGAAAAAGGCCATCGTGGACCTGCTGTTCAAGACCAACCGGAAA |
| | GTGACCGTGAAGCAGCTGAAAGAGGACTACTTCAAGAAAATCGAGTGCT |
| | TCGACTCCGTGGAAATCTCCGGCGTGGAAGATCGGTTCAACGCCTCCCT |
| | GGGCACATACCACGATCTGCTGAAAATTATCAAGGACAAGGACTTCCTG |
| | GACAATGAGGAAAACGAGGACATTCTGGAAGATATCGTGCTGACCCTGA |
| | CACTGTTTGAGGACAGAGAGATGATCGAGGAACGGCTGAAAACCTATGC |
| | CCACCTGTTCGACGACAAAGTGATGAAGCAGCTGAAGCGGCGGAGATA |
| | CACCGGCTGGGGCAGGCTGAGCCGGAAGCTGATCAACGGCATCCGGGA |
| | CAAGCAGTCCGGCAAGACAATCCTGGATTTCCTGAAGTCCGACGGCTTC |
| | GCCAACAGAAACTTCATGCAGCTGATCCACGACGACAGCCTGACCTTTA |
| | AAGAGGACATCCAGAAAGCCCAGGTGTCCGGCCAGGGCGATAGCCTGC |
| | ACGAGCACATTGCCAATCTGGCCGGCAGCCCCGCCATTAAGAAGGGCAT |
| | CCTGCAGACAGTGAAGGTGGTGGACGAGCTCGTGAAAGTGATGGGCCG |
| | GCACAAGCCCGAGAACATCGTGATCGAAATGGCCAGAGAGAACCAGAC |
| | CACCCAGAAGGGACAGAAGAACAGCCGCGAGAGAATGAAGCGGATCGA |
| | AGAGGGCATCAAAGAGCTGGGCAGCCAGATCCTGAAAGAACACCCCGT |
| | GGAAAACACCCAGCTGCAGAACGAGAAGCTGTACCTGTACTACCTGCAG |
| | AATGGGCGGGATATGTACGTGGACCAGGAACTGGACATCAACCGGCTGT |
| | CCGACTACGATGTGGACCATATCGTGCCTCAGAGCTTTCTGAAGGACGA |
| | CTCCATCGACAACAAGGTGCTGACCAGAAGCGACAAGAACCGGGGCAA |
| | GAGCGACAACGTGCCCTCCGAAGAGGTCGTGAAGAAGATGAAGAACTA |
| | CTGGCGGCAGCTGCTGAACGCCAAGCTGATTACCCAGAGAAAGTTCGAC |
| | AATCTGACCAAGGCCGAGAGAGGCGGCCTGAGCGAACTGGATAAGGCC |
| | GGCTTCATCAAGAGACAGCTGGTGGAAACCCGGCAGATCACAAAGCAC |
| | GTGGCACAGATCCTGGACTCCCGGATGAACACTAAGTACGACGAGAATG |
| | ACAAGCTGATCCGGGAAGTGAAAGTGATCACCCTGAAGTCCAAGCTGGT |
| | GTCCGATTTCCGGAAGGATTTCCAGTTTTACAAAGTGCGCGAGATCAAC |
| | AACTACCACCACGCCCACGACGCCTACCTGAACGCCGTCGTGGGAACCG |
| | CCCTGATCAAAAAGTACCCTAAGCTGGAAAGCGAGTTCGTGTACGGCGA |
| | CTACAAGGTGTACGACGTGCGGAAGATGATCGCCAAGAGCGAGCAGGA |
| | AATCGGCAAGGCTACCGCCAAGTACTTCTTCTACAGCAACATCATGAAC |
| | TTTTTCAAGACCGAGATTACCCTGGCCAACGGCGAGATCCGGAAGCGGC |
| | CTCTGATCGAGACAAACGGCGAAACCGGGGAGATCGTGTGGGATAAGG |
| | GCCGGGATTTTGCCACCGTGCGGAAAGTGCTGAGCATGCCCCAAGTGAA |
| | TATCGTGAAAAAGACCGAGGTGCAGACAGGCGGCTTCAGCAAAGAGTC |
| | TATCCTGCCCAAGAGGAACAGCGATAAGCTGATCGCCAGAAAGAAGGA |
| | CTGGGACCCTAAGAAGTACGGCGGCTTCGACAGCCCCACCGTGGCCTAT |
| | TCTGTGCTGGTGGTGGCCAAAGTGGAAAAGGGCAAGTCCAAGAAACTG |
| | AAGAGTGTGAAAGAGCTGCTGGGGATCACCATCATGGAAAGAAGCAGC |
| | TTCGAGAAGAATCCCATCGACTTTCTGGAAGCCAAGGGCTACAAAGAAG |
| | TGAAAAAGGACCTGATCATCAAGCTGCCTAAGTACTCCCTGTTCGAGCT |
| | GGAAAACGGCCGGAAGAGAATGCTGGCCTCTGCCGGCGAACTGCAGAA |
| | GGGAAACGAACTGGCCCTGCCCTCCAAATATGTGAACTTCCTGTACCTG |
| | GCCAGCCACTATGAGAAGCTGAAGGGCTCCCCCGAGGATAATGAGCAG |
| | AAACAGCTGTTTGTGGAACAGCACAAGCACTACCTGGACGAGATCATCG |
| | AGCAGATCAGCGAGTTCTCCAAGAGAGTGATCCTGGCCGACGCTAATCT |
| | GGACAAAGTGCTGTCCGCCTACAACAAGCACCGGGATAAGCCCATCAGA |
| | GAGCAGGCCGAGAATATCATCCACCTGTTTACCCTGACCAATCTGGGAG |
| | CCCCTGCCGCCTTCAAGTACTTTGACACCACCATCGACCGGAAGAGGTA |
| | CACCAGCACCAAAGAGGTGCTGGACGCCACCCTGATCCACCAGAGCATC |
| | ACCGGCCTGTACGAGACACGGATCGACCTGTCTCAGCTGGGAGGCGACA |
| | AGCGTCCTGCTGCTACTAAGAAAGCTGGTCAAGCTAAGAAAAAGAAATG |
| | AATCGATTAGCAATAAAGGATCGTTTATTTTCATTGGAAGCGTGTGTTGG |
| | TTTTTTGATCAGGCGCGGGTACCAGGTCGCGGCCGCTCTAGAGCATGGC |
| | TACGTAGATAAGTAGCATGGCGGGTTAATCATTAACTACAAGGAACCCC |
| | TAGTGATGGAGTTGGCCACTCCCTCTCTGCGCGCTCGCTCGCTCACTGAG |
| | GCCGGGCGACCAAAGGTCGCCCGACGCCCGGGCTTTGCCCGGGCGGCCT |
| | CAGTGAGCGAGCGAGCGCGCAGAGAGGGACATGCAAGCTGTAGCCAAC |
| | CACTAGAACTATAGCTAGAGTCCTGGGCGAACAAACGATGCTCGCCTTC |
| | CAGAAAACCGAGGATGCGAACCACTTCATCCGGGGTCAGCACCACCGGC |
| | AAGCGCCGCGACGGCCGAGGTCTTCCGATCTCCTGAAGCCAGGGCAGAT |
| | CCGTGCACAGCACCTTGCCGTAGAAGAACAGCAAGGCCGCCAATGCCTG |
| | ACGATGCGTGGAGACCGAAACCTTGCGCTCGTTCGCCAGCCAGGACAGA |
| | AATGCCTCGACTTCGCTGCTGCCCAAGGTTGCCGGGTGACGCACACCGT |
| | GGAAACGGATGAAGGCACGAACCCAGTTGACATAAGCCTGTTCGGTTCG |
| | TAAACTGTAATGCAAGTAGCGTATGCGCTCACGCAACTGGTCCAGAACC |
| | TTGACCGAACGCAGCGGTGGTAACGGCGCAGTGGCGGTTTTCATGGCTT |
| | GTTATGACTGTTTTTTTGTACAGTCTATGCCTCGGGCATCCAAGCAGCAA |
| | GCGCGTTACGCCGTGGGTCGATGTTTGATGTTATGGAGCAGCAACGATG |
| | TTACGCAGCAGCAACGATGTTACGCAGCAGGGCAGTCGCCCTAAAACAA |
| | AGTTAGGTGGCTCAAGTATGGGCATCATTCGCACATGTAGGCTCGGCCC |
| | TGACCAAGTCAAATCCATGCGGGCTGCTCTTGATCTTTTCGGTCGTGAGT |
| | TCGGAGACGTAGCCACCTACTCCCAACATCAGCCGGACTCCGATTACCT |
| | CGGGAACTTGCTCCGTAGTAAGACATTCATCGCGCTTGCTGCCTTCGACC |
| | AAGAAGCGGTTGTTGGCGCTCTCGCGGCTTACGTTCTGCCCAAGTTTGAG |
| | CAGCCGCGTAGTGAGATCTATATCTATGATCTCGCAGTCTCCGGCGAGC |
| | ACCGGAGGCAGGGCATTGCCACCGCGCTCATCAATCTCCTCAAGCATGA |
| | GGCCAACGCGCTTGGTGCTTATGTGATCTACGTGCAAGCAGATTACGGT |
| | GACGATCCCGCAGTGGCTCTCTATACAAAGTTGGGCATACGGGAAGAAG |
| | TGATGCACTTTGATATCGACCCAAGTACCGCCACCTAACAATTCGTTCAA |
| | GCCGAGATCGGCTTCCCGGCCGCGGAGTTGTTCGGTAAATTGTCACAAC |
| | GCCGCGAATATAGTCTTTACCATGCCCTTGGCCACGCCCCTCTTTAATAC |
| | GACGGGCAATTTGCACTTCAGAAAATGAAGAGTTTGCTTTAGCCATAAC |
| | AAAAGTCCAGTATGCTTTTTCACAGCATAACTGGACTGATTTCAGTTTAC |
| | AACTATTCTGTCTAGTTTAAGACTTTATTGTCATAGTTTAGATCTATTTTG |
| | TTCAGTTTAAGACTTTATTGTCCGCCCACACCCGCTTACGC |

[0323] In some embodiments of the gene editing constructs of the disclosure, including those embodiments encompassing SEQ ID NOs: 899-902, the construct comprises or consists of a promoter and a nuclease. In some embodiments, the construct comprises or consists of an CK8e promoter and a Cas9 nuclease. In some embodiments, the construct comprises or consists of an CK8e promoter and a Cas9 nuclease isolated or derived from Staphylococcus pyogenes (“SpCas9”). In some embodiments, the CK8e promoter comprises or consists of a nucleotide sequence of TGCCCATGTAAGGAGGCAAGGCCTGGGGACACCCGAGATGCCTGGTTATAATTA ACCCAGACATGTGGCTGCCCCCCCCCCCCCAACACCTGCTGCCTCTAAAAATAAC CCTGCATGCCATGTTCCCGGCGAAGGGCCAGCTGTCCCCCGCCAGCTAGACTCAG CACTTAGTTTAGGAACCAGTGAGCAAGTCAGCCCTTGGGGCAGCCCATACAAGG CCATGGGGCTGGGCAAGCTGCACGCCTGGGTCCGGGGTGGGCACGGTGCCCGGG CAACGAGCTGAAAGCTCATCTGCTCTCAGGGGCCCCTCCCTGGGGACAGCCCCTC CTGGCTAGTCACACCCTGTAGGCTCCTCTATATAACCCAGGGGCACAGGGGCTGC CCTCATTCTACCACCACCTCCACAGCACAGACAGACACTCAGGAGCCAGCCAGC (SEQ ID NO: 875). In some embodiments, the SpCas9 nuclease comprises or consists of a nucleotide sequence of GACAAGAAGTACAGCATCGGCCTGGACATCGGCACCAACTCTGTGGGCTGGGCC GTGATCACCGACGAGTACAAGGTGCCCAGCAAGAAATTCAAGGTGCTGGGCAAC ACCGACCGGCACAGCATCAAGAAGAACCTGATCGGAGCCCTGCTGTTCGACAGC GGCGAAACAGCCGAGGCCACCCGGCTGAAGAGAACCGCCAGAAGAAGATACAC CAGACGGAAGAACCGGATCTGCTATCTGCAAGAGATCTTCAGCAACGAGATGGC CAAGGTGGACGACAGCTTCTTCCACAGACTGGAAGAGTCCTTCCTGGTGGAAGA GGATAAGAAGCACGAGCGGCACCCCATCTTCGGCAACATCGTGGACGAGGTGGC CTACCACGAGAAGTACCCCACCATCTACCACCTGAGAAAGAAACTGGTGGACAG CACCGACAAGGCCGACCTGCGGCTGATCTATCTGGCCCTGGCCCACATGATCAAG TTCCGGGGCCACTTCCTGATCGAGGGCGACCTGAACCCCGACAACAGCGACGTG GACAAGCTGTTCATCCAGCTGGTGCAGACCTACAACCAGCTGTTCGAGGAAAAC CCCATCAACGCCAGCGGCGTGGACGCCAAGGCCATCCTGTCTGCCAGACTGAGC AAGAGCAGACGGCTGGAAAATCTGATCGCCCAGCTGCCCGGCGAGAAGAAGAAT GGCCTGTTCGGCAACCTGATTGCCCTGAGCCTGGGCCTGACCCCCAACTTCAAGA GCAACTTCGACCTGGCCGAGGATGCCAAACTGCAGCTGAGCAAGGACACCTACG ACGACGACCTGGACAACCTGCTGGCCCAGATCGGCGACCAGTACGCCGACCTGT TTCTGGCCGCCAAGAACCTGTCCGACGCCATCCTGCTGAGCGACATCCTGAGAGT GAACACCGAGATCACCAAGGCCCCCCTGAGCGCCTCTATGATCAAGAGATACGA CGAGCACCACCAGGACCTGACCCTGCTGAAAGCTCTCGTGCGGCAGCAGCTGCC TGAGAAGTACAAAGAGATTTTCTTCGACCAGAGCAAGAACGGCTACGCCGGCTA CATTGACGGCGGAGCCAGCCAGGAAGAGTTCTACAAGTTCATCAAGCCCATCCT GGAAAAGATGGACGGCACCGAGGAACTGCTCGTGAAGCTGAACAGAGAGGACC TGCTGCGGAAGCAGCGGACCTTCGACAACGGCAGCATCCCCCACCAGATCCACC TGGGAGAGCTGCACGCCATTCTGCGGCGGCAGGAAGATTTTTACCCATTCCTGAA GGACAACCGGGAAAAGATCGAGAAGATCCTGACCTTCCGCATCCCCTACTACGT GGGCCCTCTGGCCAGGGGAAACAGCAGATTCGCCTGGATGACCAGAAAGAGCGA GGAAACCATCACCCCCTGGAACTTCGAGGAAGTGGTGGACAAGGGCGCTTCCGC CCAGAGCTTCATCGAGCGGATGACCAACTTCGATAAGAACCTGCCCAACGAGAA GGTGCTGCCCAAGCACAGCCTGCTGTACGAGTACTTCACCGTGTATAACGAGCTG ACCAAAGTGAAATACGTGACCGAGGGAATGAGAAAGCCCGCCTTCCTGAGCGGC GAGCAGAAAAAGGCCATCGTGGACCTGCTGTTCAAGACCAACCGGAAAGTGACC GTGAAGCAGCTGAAAGAGGACTACTTCAAGAAAATCGAGTGCTTCGACTCCGTG GAAATCTCCGGCGTGGAAGATCGGTTCAACGCCTCCCTGGGCACATACCACGATC TGCTGAAAATTATCAAGGACAAGGACTTCCTGGACAATGAGGAAAACGAGGACA TTCTGGAAGATATCGTGCTGACCCTGACACTGTTTGAGGACAGAGAGATGATCGA GGAACGGCTGAAAACCTATGCCCACCTGTTCGACGACAAAGTGATGAAGCAGCT GAAGCGGCGGAGATACACCGGCTGGGGCAGGCTGAGCCGGAAGCTGATCAACG GCATCCGGGACAAGCAGTCCGGCAAGACAATCCTGGATTTCCTGAAGTCCGACG GCTTCGCCAACAGAAACTTCATGCAGCTGATCCACGACGACAGCCTGACCTTTAA AGAGGACATCCAGAAAGCCCAGGTGTCCGGCCAGGGCGATAGCCTGCACGAGCA CATTGCCAATCTGGCCGGCAGCCCCGCCATTAAGAAGGGCATCCTGCAGACAGT GAAGGTGGTGGACGAGCTCGTGAAAGTGATGGGCCGGCACAAGCCCGAGAACAT CGTGATCGAAATGGCCAGAGAGAACCAGACCACCCAGAAGGGACAGAAGAACA GCCGCGAGAGAATGAAGCGGATCGAAGAGGGCATCAAAGAGCTGGGCAGCCAG ATCCTGAAAGAACACCCCGTGGAAAACACCCAGCTGCAGAACGAGAAGCTGTAC CTGTACTACCTGCAGAATGGGCGGGATATGTACGTGGACCAGGAACTGGACATC AACCGGCTGTCCGACTACGATGTGGACCATATCGTGCCTCAGAGCTTTCTGAAGG ACGACTCCATCGACAACAAGGTGCTGACCAGAAGCGACAAGAACCGGGGCAAG AGCGACAACGTGCCCTCCGAAGAGGTCGTGAAGAAGATGAAGAACTACTGGCGG CAGCTGCTGAACGCCAAGCTGATTACCCAGAGAAAGTTCGACAATCTGACCAAG GCCGAGAGAGGCGGCCTGAGCGAACTGGATAAGGCCGGCTTCATCAAGAGACAG CTGGTGGAAACCCGGCAGATCACAAAGCACGTGGCACAGATCCTGGACTCCCGG ATGAACACTAAGTACGACGAGAATGACAAGCTGATCCGGGAAGTGAAAGTGATC ACCCTGAAGTCCAAGCTGGTGTCCGATTTCCGGAAGGATTTCCAGTTTTACAAAG TGCGCGAGATCAACAACTACCACCACGCCCACGACGCCTACCTGAACGCCGTCG TGGGAACCGCCCTGATCAAAAAGTACCCTAAGCTGGAAAGCGAGTTCGTGTACG GCGACTACAAGGTGTACGACGTGCGGAAGATGATCGCCAAGAGCGAGCAGGAA ATCGGCAAGGCTACCGCCAAGTACTTCTTCTACAGCAACATCATGAACTTTTTCA AGACCGAGATTACCCTGGCCAACGGCGAGATCCGGAAGCGGCCTCTGATCGAGA CAAACGGCGAAACCGGGGAGATCGTGTGGGATAAGGGCCGGGATTTTGCCACCG TGCGGAAAGTGCTGAGCATGCCCCAAGTGAATATCGTGAAAAAGACCGAGGTGC AGACAGGCGGCTTCAGCAAAGAGTCTATCCTGCCCAAGAGGAACAGCGATAAGC TGATCGCCAGAAAGAAGGACTGGGACCCTAAGAAGTACGGCGGCTTCGACAGCC CCACCGTGGCCTATTCTGTGCTGGTGGTGGCCAAAGTGGAAAAGGGCAAGTCCA AGAAACTGAAGAGTGTGAAAGAGCTGCTGGGGATCACCATCATGGAAAGAAGC AGCTTCGAGAAGAATCCCATCGACTTTCTGGAAGCCAAGGGCTACAAAGAAGTG AAAAAGGACCTGATCATCAAGCTGCCTAAGTACTCCCTGTTCGAGCTGGAAAAC GGCCGGAAGAGAATGCTGGCCTCTGCCGGCGAACTGCAGAAGGGAAACGAACTG GCCCTGCCCTCCAAATATGTGAACTTCCTGTACCTGGCCAGCCACTATGAGAAGC TGAAGGGCTCCCCCGAGGATAATGAGCAGAAACAGCTGTTTGTGGAACAGCACA AGCACTACCTGGACGAGATCATCGAGCAGATCAGCGAGTTCTCCAAGAGAGTGA TCCTGGCCGACGCTAATCTGGACAAAGTGCTGTCCGCCTACAACAAGCACCGGG ATAAGCCCATCAGAGAGCAGGCCGAGAATATCATCCACCTGTTTACCCTGACCA ATCTGGGAGCCCCTGCCGCCTTCAAGTACTTTGACACCACCATCGACCGGAAGAG GTACACCAGCACCAAAGAGGTGCTGGACGCCACCCTGATCCACCAGAGCATCAC CGGCCTGTACGAGACACGGATCGACCTGTCTCAGCTGGGAGGCGAC (SEQ ID NO:872). In some embodiments, the construct comprising a promoter and a nuclease further comprises at least two inverted terminal repeat (ITR) sequences. In some embodiments, the construct comprising a promoter and a nuclease further comprises at least two ITR sequences from isolated or derived from an AAV of serotype 2 (AAV2). In some embodiments, the construct comprising a promoter and a nuclease further comprises at least two ITR sequences each comprising or consisting of a nucleotide sequence of GGCCACTCCCTCTCTGCGCGCTCGCTCGCTCACTGAGGCCGGGCGACCAAAGGTC GCCCGACGCCCGGGCTTTGCCCGGGCGGCCTCAGTGAGCGAGCGAGCGCGCAGA GAGGGA (SEQ ID NO:880). In some embodiments, the construct comprising a promoter and a nuclease further comprises at least two ITR sequences, wherein the first ITR sequence comprises or consists of a nucleotide sequence of CCTGCAGGCAGCTGCGCGCTCGCTCGCTCACTGAGGCCGCCCGGGCAAAGCCCG GGCGTCGGGCGACCTTTGGTCGCCCGGCCTCAGTGAGCGAGCGAGCGCGCAGAG AGGGAGTGGCCAACTCCATCACTAGGGGTTCCT (SEQ ID NO: 881) and the second ITR sequence comprises or consist of a nucleotide sequence of AGGAACCCCTAGTGATGGAGTTGGCCACTCCCTCTCTGCGCGCTCGCTCGCTCAC TGAGGCCGGGCGACCAAAGGTCGCCCGACGCCCGGGCTTTGCCCGGGCGGCCTC AGTGAGCGAGCGAGCGCGCAGCTGCCTGCAGG (SEQ ID NO: 882). In some embodiments, the construct comprises or consists of, from 5′ to 3′ a first ITR, a sequence encoding a promoter, a sequence encoding a nuclease and a second ITR. In some embodiments, the construct comprises or consists of, from 5′ to 3′ a first AAV2 ITR, a sequence encoding an CK8e promoter, a sequence encoding a SpCas9 nuclease and a second AAV2 ITR. In some embodiments, the construct comprising or consisting of, from 5′ to 3′ a first ITR, a sequence encoding a promoter, a sequence encoding a nuclease and a second ITR, further comprises a poly A sequence. In some embodiments, the polyA sequence comprises or consists of a minipolyA sequence. Exemplary minipolyA sequences of the disclosure comprise or consist of a nucleotide sequence of TAGCAATAAAGGATCGTTTATTTTCATTGGAAGCGTGTGTTGGTTTTTTGATCAGG CGCG (SEQ ID NO: 903). In some embodiments, the construct comprises or consists of, from 5′ to 3′ a first ITR, a sequence encoding a promoter, a sequence encoding a nuclease, a poly A sequence and a second ITR. In some embodiments, the construct comprises or consists of, from 5′ to 3′ a first ITR, a sequence encoding a promoter, a sequence encoding a nuclease, a minipoly A sequence and a second ITR. In some embodiments, the construct comprises or consists of, from 5′ to 3′ a first AAV2 ITR, a sequence encoding an CK8e promoter, a sequence encoding a SpCas9 nuclease, a minipoly A sequence and a second AAV2 ITR. In some embodiments, the construct comprising, from 5′ to 3′ a first ITR, a sequence encoding a promoter, a sequence encoding a nuclease, a poly A sequence and a second ITR, further comprises at least one nuclear localization signal. In some embodiments, the construct comprising, from 5′ to 3′ a first ITR, a sequence encoding a promoter, a sequence encoding a nuclease, a poly A sequence and a second ITR, further comprises at least two nuclear localization signals. Exemplary nuclear localization signals of the disclosure comprise or consist of a nucleotide sequence of AAGCGTCCTGCTGCTACTAAGAAAGCTGGTCAAGCTAAGAAAAAGAAA (SEQ ID NO. 887), or a nucleotide sequence of ATGGCCCCAAAGAAGAAGCGGAAGGTCGGTATCCACGGAGTCCCAGCAGCC (SEQ ID NO. 885). In some embodiments, the construct comprises or consists of, from 5′ to 3′ a first ITR, a sequence encoding a promoter, a sequence encoding a first nuclear localization signal, a sequence encoding a nuclease, a poly A sequence and a second ITR. In some embodiments, the construct comprises or consists of, from 5′ to 3′ a first ITR, a sequence encoding a promoter, a sequence encoding a first nuclear localization signal, a sequence encoding a nuclease, a sequence encoding a second nuclear localization signal, a poly A sequence and a second ITR. In some embodiments, the construct comprises or consists of, from 5′ to 3′ a first AAV2 ITR, a sequence encoding a CK8e promoter, a nuclear localization signal having a sequence of SEQ ID NO: 885, a sequence encoding a SpCas9 nuclease, a minipoly A sequence and a second AAV2 ITR. In some embodiments, the construct comprises or consists of, from 5′ to 3′ a first AAV2 ITR, a sequence encoding a CK8e promoter, a sequence encoding a SpCas9 nuclease, a nuclear localization signal having a sequence of SEQ ID NO: 887, a minipoly A sequence and a second AAV2 ITR. In some embodiments, the construct comprises or consists of, from 5′ to 3′ a first AAV2 ITR, a sequence encoding a

[0324] CK8e promoter, a nuclear localization signal having a sequence of SEQ ID NO. 885, a sequence encoding a SpCas9 nuclease, a nuclear localization signal having a sequence of SEQ ID NO: 887, a minipoly A sequence and a second AAV2 ITR. In some embodiments, the construct comprising, from 5′ to 3′ a first ITR, a sequence encoding a promoter, a sequence encoding a first nuclear localization signal, a sequence encoding a nuclease, a sequence encoding a second nuclear localization signal, a poly A sequence and a second ITR, further comprises a stop codon. The stop codon may have a sequence of TAG (SEQ ID NO. 904), TAA (SEQ ID NO. 905), or TGA (SEQ ID NO. 906). In some embodiments, the construct comprises or consists of, from 5′ to 3′ a first ITR, a sequence encoding a promoter, a sequence encoding a first nuclear localization signal, a sequence encoding a nuclease, a sequence encoding a second nuclear localization signal, a stop codon, a poly A sequence and a second ITR. In some embodiments, the construct comprises or consists of, from 5′ to 3′ a first AAV2 ITR, a sequence encoding a CK8e promoter, a nuclear localization signal having a sequence of SEQ ID NO: 885, a sequence encoding a SpCas9 nuclease, a stop codon, a minipoly A sequence and a second AAV2 ITR. In some embodiments, the construct comprises or consists of, from 5′ to 3′ a first AAV2 ITR, a sequence encoding an CK8e promoter, a sequence encoding a SpCas9 nuclease, a nuclear localization signal having a sequence of SEQ ID NO: 887, a stop codon, a minipoly A sequence and a second AAV2 ITR. In some embodiments, the construct comprises or consists of, from 5′ to 3′ a first AAV2 ITR, a sequence encoding an CK8e promoter, a nuclear localization signal having a sequence of SEQ ID NO. 885, a sequence encoding a SpCas9 nuclease, a nuclear localization signal having a sequence of SEQ ID NO: 887, a stop codon a minipoly A sequence and a second AAV2 ITR. In some embodiments, the construct comprising or consisting of, from 5′ to 3′ a first ITR, a sequence encoding a promoter, a sequence encoding a first nuclear localization signal, a sequence encoding a nuclease, a sequence encoding a second nuclear localization signal, a stop codon, a poly A sequence and a second ITR, further comprises transposable element inverted repeats. Exemplary transposable element inverted repeats of the disclosure comprise or consist of a nucleotide sequence of TGTGGGCGGACAAAATAGTTGGGAACTGGGAGGGGTGGAAATGGAGTTTTTAAG GATTATTTAGGGAAGAGTGACAAAATAGATGGGAACTGGGTGTAGCGTCGTAAG CTAATACGAAAATTAAAAATGACAAAATAGTTTGGAACTAGATTTCACTTATCTG GTT (SEQ ID NO. 907) and/or a nucleotide sequence of GAATATAGTCTTTACCATGCCCTTGGCCACGCCCCTCTTTAATACGACGGGCAAT TTGCACTTCAGAAAATGAAGAGTTTGCTTTAGCCATAACAAAAGTCCAGTATGCT TTTTCACAGCATAACTGGACTGATTTCAGTTTACAACTATTCTGTCTAGTTTAAGA CTTTATTGTCATAGTTTAGATCTATTTTGTTCAGTTTAAGACTTTATTGTCCGCCCA CA (SEQ ID NO. 908). In some embodiments, the construct comprises or consists of, from 5′ to 3′ a first transposable element inverted repeat, a first ITR, a sequence encoding a promoter, a sequence encoding a first nuclear localization signal, a sequence encoding a nuclease, a sequence encoding a second nuclear localization signal, a stop codon, a poly A sequence, a second ITR, and a second transposable element inverted repeat. In some embodiments, the construct comprises or consists of, from 5′ to 3′ a first transposable element inverted repeat having a sequence of SEQ ID NO. 907, a first AAV2 ITR, a sequence encoding a CK8e promoter, a nuclear localization signal having a sequence of SEQ ID NO. 885, a sequence encoding a SpCas9 nuclease, a nuclear localization signal having a sequence of SEQ ID NO: 887, a stop codon a minipoly A sequence, a second AAV2 ITR, and a second transposable element inverted repeat having a sequence of SEQ ID NO. 908. In some embodiments, the construct comprising or consisting of, from 5′ to 3′, a first transposable element inverted repeat, a first ITR, a sequence encoding a promoter, a sequence encoding a first nuclear localization signal, a sequence encoding a nuclease, a sequence encoding a second nuclear localization signal, a stop codon, a poly A sequence, a second ITR, and a second transposable element inverted repeat, further comprises a regulatory sequence. Exemplary regulatory sequences of the disclosure comprise or consist of a nucleotide sequence of CATGCAAGCTGTAGCCAACCACTAGAACTATAGCTAGAGTCCTGGGCGAACAAA CGATGCTCGCCTTCCAGAAAACCGAGGATGCGAACCACTTCATCCGGGGTCAGC ACCACCGGCAAGCGCCGCGACGGCCGAGGTCTTCCGATCTCCTGAAGCCAGGGC AGATCCGTGCACAGCACCTTGCCGTAGAAGAACAGCAAGGCCGCCAATGCCTGA CGATGCGTGGAGACCGAAACCTTGCGCTCGTTCGCCAGCCAGGACAGAAATGCC TCGACTTCGCTGCTGCCCAAGGTTGCCGGGTGACGCACACCGTGGAAACGGATG AAGGCACGAACCCAGTTGACATAAGCCTGTTCGGTTCGTAAACTGTAATGCAAGT AGCGTATGCGCTCACGCAACTGGTCCAGAACCTTGACCGAACGCAGCGGTGGTA ACGGCGCAGTGGCGGTTTTCATGGCTTGTTATGACTGTTTTTTTGTACAGTCTATG CCTCGGGCATCCAAGCAGCAAGCGCGTTACGCCGTGGGTCGATGTTTGATGTTAT GGAGCAGCAACGATGTTACGCAGCAGCAACGATGTTACGCAGCAGGGCAGTCGC CCTAAAACAAAGTTAGGTGGCTCAAGTATGGGCATCATTCGCACATGTAGGCTCG GCCCTGACCAAGTCAAATCCATGCGGGCTGCTCTTGATCTTTTCGGTCGTGAGTT CGGAGACGTAGCCACCTACTCCCAACATCAGCCGGACTCCGATTACCTCGGGAA CTTGCTCCGTAGTAAGACATTCATCGCGCTTGCTGCCTTCGACCAAGAAGCGGTT GTTGGCGCTCTCGCGGCTTACGTTCTGCCCAAGTTTGAGCAGCCGCGTAGTGAGA TCTATATCTATGATCTCGCAGTCTCCGGCGAGCACCGGAGGCAGGGCATTGCCAC CGCGCTCATCAATCTCCTCAAGCATGAGGCCAACGCGCTTGGTGCTTATGTGATC TACGTGCAAGCAGATTACGGTGACGATCCCGCAGTGGCTCTCTATACAAAGTTGG GCATACGGGAAGAAGTGATGCACTTTGATATCGACCCAAGTACCGCCACCTAAC AATTCGTTCAAGCCGAGATCGGCTTCCCGGCCGCGGAGTTGTTCGGTAAATTGTC ACAACGCCG (SEQ ID NO. 909). In some embodiments, the construct comprises or consists of, from 5′ to 3′ a first transposable element inverted repeat, a first ITR, a sequence encoding a promoter, a sequence encoding a first nuclear localization signal, a sequence encoding a nuclease, a sequence encoding a second nuclear localization signal, a stop codon, a poly A sequence, a second ITR, a regulatory sequence and a second transposable element inverted repeat. In some embodiments, the construct comprises or consists of, from 5′ to 3′ a first transposable element inverted repeat having a sequence of SEQ ID NO. 907, a first AAV2 ITR, a sequence encoding a CK8e promoter, a nuclear localization signal having a sequence of SEQ ID NO. 885, a sequence encoding a SpCas9 nuclease, a nuclear localization signal having a sequence of SEQ ID NO: 887, a stop codon a minipoly A sequence, a second AAV2 ITR, a regulatory sequence having a sequence of SEQ ID NO. 909, and a second transposable element inverted repeat having a sequence of SEQ ID NO. 908. In some embodiments, the construct may further comprise one or more spacer sequences. Exemplary spacer sequences of the disclosure have length from 1-1500 nucleotides, inclusive of all ranges therebetween. In some embodiments, the spacer sequences may be located either 5′ to or 3′ to an ITR, a promoter, a nuclear localization sequence, a nuclease, a stop codon, a polyA sequence, a transposable element inverted repeat, and/or a regulator element. In some embodiments, the construct may have a sequence comprising or consisting of SEQ ID NO: 899, SEQ ID NO: 900, SEQ ID NO: 901, or SEQ ID NO: 902.

[0325] E. AAV-sgRNA Vectors

[0326] In some embodiments, at least a first sequence encoding a gRNA and a second sequence encoding a gRNA may be packaged into an AAV vector. In some embodiments, at least a first sequence encoding a gRNA, a second sequence encoding a gRNA, and a third sequence encoding a gRNA may be packaged into an AAV vector. In some embodiments, at least a first sequence encoding a gRNA, a second sequence encoding a gRNA, a third sequence encoding a gRNA, and a fourth sequence encoding a gRNA may be packaged into an AAV vector. In some embodiments, at least a first sequence encoding a gRNA, a second sequence encoding a gRNA, a third sequence encoding a gRNA, a fourth sequence encoding a gRNA, and a fifth sequence encoding a gRNA may be packaged into an AAV vector. In some embodiments, a plurality of sequences encoding a gRNA are packaged into an AAV vector. For example, 1, 2, 3, 4, 5, 6, 7, 8, 9, 10, 11, 12, 13, 14, 15, 16, 17, 18, 19, or 20 sequences encoding a gRNA may be packaged into an AAV vector. In some embodiments, each sequence encoding a gRNA is different. In some embodiments, at least 1, 2, 3, 4, 5, 6, 7, 8, 9, 10, 11, 12, 13, 14, 15, 16, 17, 18, 19, or 20 of the sequences encoding a gRNA are the same. In some embodiments, all of the sequence encoding a gRNA are the same.

[0327] In some embodiments, the AAV vector is a wildtype AAV vector. In some embodiments, the AAV vector contains one or more mutations. In some embodiments, the AAV vector is isolated or derived from an AAV vector of serotype AAV1, AAV2, AAV3, AAV4, AAV5, AAV6, AAV7, AAV8, AAV9, AAV10, AAV11 or any combination thereof.

[0328] Exemplary AAV-sgRNA vectors contain two ITR (inverted terminal repeat) sequences which flank a central sequence region comprising the sgRNA sequences. In some embodiments, the ITRs are isolated or derived from an AAV vector of serotype AAV1, AAV2, AAV3, AAV4, AAV5, AAV6, AAV7, AAV8, AAV9, AAV10, AAV11 or any combination thereof. In some embodiments, the ITRs are isolated or derived from an AAV vector of a first serotype and a sequence encoding a capsid protein of the AAV-sgRNA vector is isolated or derived from an AAV vector of a second serotype. In some embodiments, the first serotype and the second serotype are the same. In some embodiments, the first serotype and the second serotype are not the same. In some embodiments, the first serotype is AAV1, AAV2, AAV3, AAV4, AAV5, AAV6, AAV7, AAV8, AAV9, AAV10, or AAV11. In some embodiments, the second serotype is AAV1, AAV2, AAV3, AAV4, AAV5, AAV6, AAV7, AAV8, AAV9, AAV10, or AAV11. In some embodiments, the first serotype is AAV2 and the second serotype is AAV1, AAV2, AAV3, AAV4, AAV5, AAV6, AAV7, AAV8, AAV9, AAV10, or AAV11. In some embodiments, the first serotype is AAV2 and the second serotype is AAV9.

[0329] Exemplary AAV-sgRNA vectors contain two ITR (inverted terminal repeat) sequences which flank a central sequence region comprising the gRNA sequences. In some embodiments, the ITRs are isolated or derived from an AAV vector of serotype AAV1, AAV2, AAV3, AAV4, AAV5, AAV6, AAV7, AAV8, AAV9, AAV10, AAV11 or any combination thereof. In some embodiments, a first ITR is isolated or derived from an AAV vector of a first serotype, a second ITR is isolated or derived from an AAV vector of a second serotype and a sequence encoding a capsid protein of the AAV-sgRNA vector is isolated or derived from an AAV vector of a third serotype. In some embodiments, the first serotype and the second serotype are the same. In some embodiments, the first serotype and the second serotype are not the same. In some embodiments, the first serotype, the second serotype, and the third serotype are the same. In some embodiments, the first serotype, the second serotype, and the third serotype are not the same. In some embodiments, the first serotype is AAV1, AAV2, AAV3, AAV4, AAV5, AAV6, AAV7, AAV8, AAV9, AAV10, or AAV11. In some embodiments, the second serotype is AAV1, AAV2, AAV3, AAV4, AAV5, AAV6, AAV7, AAV8, AAV9, AAV10, or AAV11. In some embodiments, the third serotype is AAV1, AAV2, AAV3, AAV4, AAV5, AAV6, AAV7, AAV8, AAV9, AAV10, or AAV11. In some embodiments, the first serotype is AAV2, the second serotype is AAV4 and the third serotype is AAV1, AAV2, AAV3, AAV4, AAV5, AAV6, AAV7, AAV8, AAV9, AAV10, or AAV11. In some embodiments, the first serotype is AAV2, the second serotype is AAV4 and the third serotype is AAV9. Exemplary AAV-sgRNA vectors contain two ITR (inverted terminal repeat) sequences which flank a central sequence region comprising the sgRNA sequences. In some embodiments, the ITRs are isolated or derived from an AAV vector of serotype AAV1, AAV2, AAV3, AAV4, AAVS, AAV6, AAV7, AAV8, AAV9, AAV10, AAV11 or any combination thereof. In some embodiments, the ITRs comprise or consist of full-length and/or wildtype sequences for an AAV serotype. In some embodiments, the ITRs comprise or consist of truncated sequences for an AAV serotype. In some embodiments, the ITRs comprise or consist of elongated sequences for an AAV serotype. In some embodiments, the ITRs comprise or consist of sequences comprising a sequence variation compared to a wildtype sequence for the same AAV serotype. In some embodiments, the sequence variation comprises one or more of a substitution, deletion, insertion, inversion, or transposition. In some embodiments, the ITRs comprise or consist of at least 100, 101, 102, 103, 104, 105, 106, 107, 108, 109, 110, 111, 112, 113, 114, 115, 116, 117, 118, 119, 120, 121, 122, 123, 124, 125, 126, 127, 128, 129, 130, 131, 132, 133, 134, 135, 136, 137, 138, 139, 140, 141, 142, 143, 144, 145, 146, 147, 148, 149 or 150 base pairs. In some embodiments, the ITRs comprise or consist of 100, 101, 102, 103, 104, 105, 106, 107, 108, 109, 110, 111, 112, 113, 114, 115, 116, 117, 118, 119, 120, 121, 122, 123, 124, 125, 126, 127, 128, 129, 130, 131, 132, 133, 134, 135, 136, 137, 138, 139, 140, 141, 142, 143, 144, 145, 146, 147, 148, 149 or 150 base pairs. In some embodiments, the ITRs have a length of 110±10 base pairs. In some embodiments, the ITRs have a length of 120±10 base pairs. In some embodiments, the ITRs have a length of 130±10 base pairs. In some embodiments, the ITRs have a length of 140±10 base pairs. In some embodiments, the ITRs have a length of 150 ±10 base pairs. In some embodiments, the ITRs have a length of 115, 145, or 141 base pairs. In some embodiments, the ITRs have a sequence selected from SEQ ID NO: 880, SEQ ID NO: 881, SEQ ID NO: 882, or SEQ ID NO: 883.

[0330] In some embodiments, the AAV-sgRNA vector may comprise additional elements to facilitate packaging of the vector and expression of the sgRNA. In some embodiments, the AAV-sgRNA vector may comprise a transposable element. In some embodiments, the AAV-sgRNA vector may comprise a regulatory element. In some embodiments, the regulatory element comprises an activator or a repressor. In some embodiments, the AAV-sgRNA sequence may comprise a non-functional or “stuffer” sequence. Exemplary stuffer sequences of the disclosure may have some (a non-zero percentage of) identity or homology to a genomic sequence of a mammal (including a human). Alternatively, exemplary stuffer sequences of the disclosure may have no identify or homology to a genomic sequence of a mammal (including a human). Exemplary stuffer sequences of the disclosure may comprise or consist of naturally occurring non-coding sequences or sequences that are neither transcribed nor translated following administration of the AAV vector to a subject.

[0331] In some embodiments, the AAV-sgRNA vector may be optimized for production in yeast, bacteria, insect cells, or mammalian cells. In some embodiments, the AAV-sgRNA vector may be optimized for expression in human cells. In some embodiments, the AAV-Cas9 vector may be optimized for expression in a bacculovirus expression system. In some embodiments, the AAV-sgRNA vector comprises at least one promoter. In some embodiments, the AAV-sgRNA vector comprises at least two promoters. In some embodiments, the AAV-sgRNA vector comprises at least three promoters. In some embodiments, the AAV-sgRNA vector comprises at least four promoters. In some embodiments, the AAV-sgRNA vector comprises at least five promoters. Exemplary promoters include, for example, immunoglobulin light chain, immunoglobulin heavy chain, T-cell receptor, HLA DQ a and/or DQ (3, (3-interferon, interleukin-2, interleukin-2 receptor, MHC class II 5, MHC class II HLA-Dra, (3-Actin, muscle creatine kinase (MCK), prealbumin (transthyretin), elastase I, metallothionein (MTII), collagenase, albumin, α-fetoprotein, t-globin, β-globin, c-fos, c-HA-ras, insulin, neural cell adhesion molecule (NCAM), α₁-antitrypain, H2B (TH2B) histone, mouse and/or type I collagen, glucose-regulated proteins (GRP94 and GRP78), rat growth hormone, human serum amyloid A (SAA), troponin I (TN I), platelet-derived growth factor (PDGF), duchenne muscular dystrophy, SV40, polyoma, retroviruses, papilloma virus, hepatitis B virus, human immunodeficiency virus, cytomegalovirus (CMV), and gibbon ape leukemia virus. Further exemplary promoters include the U6 promoter, the H1 promoter, and the 7SK promoter.

[0332] In some embodiments, the sequence encoding the gRNA comprises a sequence selected from SEQ ID Nos: 383-705, 709-711, 715-717, 790-862, and 864.

[0333] In some embodiments, the AAV vector comprises a first sequence encoding a gRNA and a second sequence encoding a gRNA, a first promoter drives expression of the first sequence encoding a gRNA and a second promoter drives expression of the second sequence encoding a gRNA. In some embodiments, the first and second promoters are the same. In some embodiments, the first and second promoters are different. In some embodiments, the first and second promoters are selected from the H1 promoter, the U6 promoter, and the 7SK promoter. In some embodiments, the first sequence encoding a gRNA and the second sequence encoding a gRNA are identical. In some embodiments, the first sequence encoding a gRNA and the second sequence encoding a gRNA are not identical.

[0334] In some embodiments, the AAV vector comprises a first sequence encoding a gRNA, a second sequence encoding a gRNA, and a third sequence encoding a gRNA, a first promoter drives expression of the first sequence encoding a gRNA, a second promoter drives expression of the second sequence encoding a gRNA, and a third promoter drives expression of a third sequence encoding a gRNA. In some embodiments, at least two of the first, second, and third promoters are the same. In some embodiments, each of the first, second, and third promoters are different. In some embodiments, the first, second, and third promoters are selected from the H1 promoter, the U6 promoter, and the 7SK promoter. In some embodiments, the first promoter is the U6 promoter. In some embodiments, the second promoter is the H1 promoter. In some embodiments, the third promoter is the 7SK promoter. In some embodiments, the first promoter is the U6 promoter, the second promoter is the H1 promoter, and the third promoter is the 7SK promoter. In some embodiments, the first sequence encoding a gRNA, the second sequence encoding a gRNA, and the third sequence encoding a gRNA are identical. In some embodiments, the first sequence encoding a gRNA, the second sequence encoding a gRNA, and the third sequence encoding a gRNA are not identical.

[0335] In some embodiments, the AAV vector comprises a first sequence encoding a gRNA, a second sequence encoding a gRNA, a third sequence encoding a gRNA, and a fourth sequence encoding a gRNA, a first promoter drives expression of the first sequence encoding a gRNA, a second promoter drives expression of the second sequence encoding a gRNA, a third promoter drives expression of the third sequence encoding a gRNA, and a fourth promoter drives expression of the fourth sequence encoding a gRNA. In some embodiments, at least two of the first, second, third, and fourth promoters are the same. In some embodiments, each of the first, second, third, and fourth promoters are different. In some embodiments, each of the first, second, third and fourth promoters are selected from the H1 promoter, the U6 promoter, and the 7SK promoter. In some embodiments, the first sequence encoding a gRNA, the second sequence encoding a gRNA, the third sequence encoding a gRNA, and the fourth sequence encoding a gRNA are identical. In some embodiments, the first sequence encoding a gRNA, the second sequence encoding a gRNA, the third sequence encoding a gRNA, and the fourth sequence encoding a gRNA are not identical.

[0336] In some embodiments, the AAV vector comprises a first sequence encoding a gRNA, a second sequence encoding a gRNA, a third sequence encoding a gRNA, a fourth sequence encoding a gRNA, and a fifth sequence encoding a gRNA, a first promoter drives expression of the first sequence encoding a gRNA, a second promoter drives expression of the second sequence encoding a gRNA, a third promoter drives expression of the third sequence encoding a gRNA, a fourth promoter drives expression of the fourth sequence encoding a gRNA, and a fifth promoter drives expression of the fifth sequence encoding a gRNA. In some embodiments, at least two of the first, second, third, fourth, and fifth promoters are the same. In some embodiments, each of the first, second, third, fourth, and fifth promoters are different. In some embodiments, each of the first, second, third, and fourth promoters are different. In some embodiments, each of the first, second, third, fourth and fifth promoters are selected from the H1 promoter, the U6 promoter, and the 7SK promoter. In some embodiments, the first sequence encoding a gRNA, the second sequence encoding a gRNA, the third sequence encoding a gRNA, the fourth sequence encoding a gRNA, and the fifth sequence encoding a gRNA are identical. In some embodiments, the first sequence encoding a gRNA, the second sequence encoding a gRNA, the third sequence encoding a gRNA, the fourth sequence encoding a gRNA, and the fifth sequence encoding a gRNA are not identical.

[0337] In some embodiments, the AAV-sgRNA vector comprises a sequence selected from SEQ ID NO: 910, SEQ ID NO: 911, SEQ ID NO: 912, or SEQ ID NO: 913. In some embodiments, the AAV-sgRNA vector comprises a sequence selected from SEQ ID NO: 914, SEQ ID NO: 915, SEQ ID NO: 916, or SEQ ID NO: 917. In some embodiments, the AAV-sgRNA vector comprises a sequence selected from SEQ ID NO: 918, SEQ ID NO: 919, SEQ ID NO: 920, or SEQ ID NO: 921. Exemplary AAV-sgRNA vectors are provided in Table 5.

TABLE 5
Exemplary AAV-sgRNA vectors.

| SEQ ID | |
|---|---|
| NO | Sequence |
| 910 | CCACTCCCTCTATGCGCGCTCGCTCACTCACTCGGCCCTGGAGACCAAAG |
| | GTCTCCAGACTGCCGGCCTCTGGCCGGCAGGGCCGAGTGAGTGAGCGAG |
| | CGCGCATAGAGGGAGTGGGTACCTCCATCATCTAGGTTTGCCAGATCTGA |
| | TATCGGCGCGCCCCTGGGCGCGCCCGAGTCCAACACCCGTGGGAATCCC |
| | ATGGGCACCATGGCCCCTCGCTCCAAAAATGCTTTCGCGTCGCGCAGACA |
| | CTGCTCGGTAGTTTCGGGGATCAGCGTTTGAGTAAGAGCCCGCGTCTGAA |
| | CCCTCCGCGCCGCCCCGGCCCCAGTGGAAAGACGCGCAGGCAAAACGCA |
| | CCACGTGACGGAGCGTGACCGCGCGCCGAGCGCGCGCCAAGGTCGGGCA |
| | GGAAGAGGGCCTATTTCCCATGATTCCTTCATATTTGCATATACGATACA |
| | AGGCTGTTAGAGAGATAATTAGAATTAATTTGACTGTAAACACAAAGAT |
| | ATTAGTACAAAATACGTGACGTAGAAAGTAATAATTTCTTGGGTAGTTTG |
| | CAGTTTTAAAATTATGTTTTAAAATGGACTATCATATGCTTACCGTAACTT |
| | GAAAGTATTTCGATTTCTTGGCTTTATATATCTTGTGGAAAGGACGAAAC |
| | ACCGCACTAGAGTAACAGTCTGACGTTTAAGAGCTATGCTGGAAACAGC |
| | ATAGCAAGTTTAAATAAGGCTAGTCCGTTATCAACTTGAAAAAGTGGCA |
| | CCGAGTCGGTGCTTTTTTTGCGGCCGCGCTCGGCGCGCCCATATTTGCAT |
| | GTCGCTATGTGTTCTGGGAAATCACCATAAACGTGAAATGTCTTTGGATT |
| | TGGGAATCTTATAAGTTCTGTATGAGACCACGGTACACCGCACTAGAGTA |
| | ACAGTCTGACGTTTAAGAGCTATGCTGGAAACAGCATAGCAAGTTTAAA |
| | TAAGGCTAGTCCGTTATCAACTTGAAAAAGTGGCACCGAGTCGGTGCTTT |
| | TTTTGCGGCCGCTGACGGCGCGCCCTGCAGTATTTAGCATGCCCCACCCA |
| | TCTGCAAGGCATTCTGGATAGTGTCAAAACAGCCGGAAATCAAGTCCGTT |
| | TATCTCAAACTTTAGCATTTTGGGAATAAATGATATTTGCTATGCTGGTTA |
| | AATTAGATTTTAGTTAAATTTCCTGCTGAAGCTCTAGTACGATAAGTAAC |
| | TTGACCTAAGTGTAAAGTTGAGATTTCCTTCAGGTTTATATAGCTTGTGC |
| | GCCGCCTGGGTACACCGCACTAGAGTAACAGTCTGACGTTTAAGAGCTAT |
| | GCTGGAAACAGCATAGCAAGTTTAAATAAGGCTAGTCCGTTATCAACTTG |
| | AAAAAGTGGCACCGAGTCGGTGCTTTTTTTGCGGCCGCGCTTGCGGCCGC |
| | CTCGAGTGATCAAAAAAACCAACACACGCTTCCAATGAAAATAAACGAT |
| | CCTTTATTGCTAGCCTTTACTTGTACAGCTCGTCCATGCCGAGAGTGATCC |
| | CGGCGGCGGTCACGAACTCCAGCAGGACCATGTGATCGCGCTTCTCGTTG |
| | GGGTCTTTGCTCAGGGCGGACTGGGTGCTCAGGTAGTGGTTGTCGGGCAG |
| | CAACACGGGGCCGTCGCCGATGGGGGTGTTCTGCTGGTAGTGGTCGGCG |
| | AGCTGCACGCTGCCGTCCTCGATGTTGTGGCGGATCTTGAAGTTCACCTT |
| | GATGCCGTTCTTCTGCTTGTCGGCCATGATATAGACGTTGTGGCTGTTGTA |
| | GTTGTACTCCAGCTTGTGCCCCAGGATGTTGCCGTCCTCCTTGAAGTCGA |
| | TGCCCTTCAGCTCGATGCGGTTCACCAGGGTGTCGCCCTCGAACTTCACC |
| | TCGGCGCGGGTCTTGTAGTTGCCGTCGTCCTTGAAGAAGATGGTGCGCTC |
| | CTGGACGTAGCCTTCGGGCATGGCGGACTTGAAGAAGTCGTGCTGCTTCA |
| | TGTGGTCGGGGTAGCGGCTGAAGCACTGCACGCCGTAGGTCAGGGTGGT |
| | CACGAGGGTGGGCCAGGGCACGGGCAGCTTGCCGGTGGTGCAGATGAAC |
| | TTCAGGGTCAGCTTGCCGTAGGTGGCATCGCCCTCGCCCTCGCCGGACAC |
| | GCTGAACTTGTGGCCGTTTACGTCGCCGTCCAGCTCGACCAGGATGGGCA |
| | CCACCCCGGTGAACAGCTCCTCGCCCTTGCTCACCATGGTGGCGACCGGT |
| | GGATCCCGGGCCCGCGGGGTGGCTTTACCAACAGTACCCGGAATGCCAA |
| | GCTTACTTAGATCGCAGTCTCGACGCTGGCTGGCTCCTGAGTGTCTGTCT |
| | GTGCTGTGGAGGTGGTGGTAGAATGAGGGCAGCCCCTGTGCCCCTGGGT |
| | TATATAGAGGAGCCTACAGGGTGTGACTAGCCAGGAGGGGCTGTCCCCA |
| | GGGAGGGGCCCCTGAGAGCAGATGAGCTTTCAGCTCGTTGCCCGGGCAC |
| | CGTGCCCACCCCGGACCCAGGCGTGCAGCTTGCCCAGCCCCATGGCCTTG |
| | TATGGGCTGCCCCAAGGGCTGACTTGCTCACTGGTTCCTAAACTAAGTGC |
| | TGAGTCTAGCTGGCGGGGGACAGCTGGCCCTTCGCCGGGAACATGGCAT |
| | GCAGGGTTATTTTTAGAGGCAGCAGGTGTTGGGGGGGGGGGGGCAGCCA |
| | CATGTCTGGGTTAATTATAACCAGGCATCTCGGGTGTCCCCAGGCCTTGC |
| | CTCCTTACATGGGCACGTCGACGATATCAGATCTAGGAACCCCTAGTGAT |
| | GGAGTTGGCCACTCCCTCTCTGCGCGCTCGCTCGCTCACTGAGGCCGCCC |
| | GGGCAAAGCCCGGGCGTCGGGCGACCTTTGGTCGCCCGGCCTCAGTGAG |
| | CGAGCGAGCGCGCAGAGAGGGAGTGG |
| 918 | CCACTCCCTCTATGCGCGCTCGCTCACTCACTCGGCCCTGGAGACCAAAG |
| | GTCTCCAGACTGCCGGCCTCTGGCCGGCAGGGCCGAGTGAGTGAGCGAG |
| | CGCGCATAGAGGGAGTGGGTACCTCCATCATCTAGGTTTGCCAGATCTGA |
| | TATCGGCGCGCCCCTGGGCGCGCCCGAGTCCAACACCCGTGGGAATCCC |
| | ATGGGCACCATGGCCCCTCGCTCCAAAAATGCTTTCGCGTCGCGCAGACA |
| | CTGCTCGGTAGTTTCGGGGATCAGCGTTTGAGTAAGAGCCCGCGTCTGAA |
| | CCCTCCGCGCCGCCCCGGCCCCAGTGGAAAGACGCGCAGGCAAAACGCA |
| | CCACGTGACGGAGCGTGACCGCGCGCCGAGCGCGCGCCAAGGTCGGGCA |
| | GGAAGAGGGCCTATTTCCCATGATTCCTTCATATTTGCATATACGATACA |
| | AGGCTGTTAGAGAGATAATTAGAATTAATTTGACTGTAAACACAAAGAT |
| | ATTAGTACAAAATACGTGACGTAGAAAGTAATAATTTCTTGGGTAGTTTG |
| | CAGTTTTAAAATTATGTTTTAAAATGGACTATCATATGCTTACCGTAACTT |
| | GAAAGTATTTCGATTTCTTGGCTTTATATATCTTGTGGAAAGGACGAAAC |
| | ACCGCACCAGAGTAACAGTCTGACGTTTAAGAGCTATGCTGGAAACAGC |
| | ATAGCAAGTTTAAATAAGGCTAGTCCGTTATCAACTTGAAAAAGTGGCA |
| | CCGAGTCGGTGCTTTTTTTGCGGCCGCGCTCGGCGCGCCCATATTTGCAT |
| | GTCGCTATGTGTTCTGGGAAATCACCATAAACGTGAAATGTCTTTGGATT |
| | TGGGAATCTTATAAGTTCTGTATGAGACCACGGTACACCGCACCAGAGTA |
| | ACAGTCTGACGTTTAAGAGCTATGCTGGAAACAGCATAGCAAGTTTAAA |
| | TAAGGCTAGTCCGTTATCAACTTGAAAAAGTGGCACCGAGTCGGTGCTTT |
| | TTTTGCGGCCGCTGACGGCGCGCCCTGCAGTATTTAGCATGCCCCACCCA |
| | TCTGCAAGGCATTCTGGATAGTGTCAAAACAGCCGGAAATCAAGTCCGTT |
| | TATCTCAAACTTTAGCATTTTGGGAATAAATGATATTTGCTATGCTGGTTA |
| | AATTAGATTTTAGTTAAATTTCCTGCTGAAGCTCTAGTACGATAAGTAAC |
| | TTGACCTAAGTGTAAAGTTGAGATTTCCTTCAGGTTTATATAGCTTGTGC |
| | GCCGCCTGGGTACACCGCACCAGAGTAACAGTCTGACGTTTAAGAGCTA |
| | TGCTGGAAACAGCATAGCAAGTTTAAATAAGGCTAGTCCGTTATCAACTT |
| | GAAAAAGTGGCACCGAGTCGGTGCTTTTTTTGCGGCCGCGCTGTTTAAAC |
| | CAACAAAATCAGCAGCTAATGAAGGCAAGTCAGCAGGTCACTCATCATT |
| | TTCCACTTCGGCAATGCAGTGGGATTATTCCAACAGAGGTTTTTCACAGC |
| | ATTCCTTCAGTTAACTGGAGATCGAATCTTGATTTTCACAGATATACTTG |
| | GCAAGGTCCGCCCTGTCATCAGCACATTCAAGCAGATCTCCATGGCAGCA |
| | TTCCGTGTGGACTTAGGTAAGATCTGTCACTAACTTGGAAACTTCTGCAA |
| | ACTCAGCTTAGGGAAATCTCTGGCTCAGGCGAGCTACTGCCTCAGCTTAG |
| | AAAGCTCTTTCTCCAAATTATTGGAGACTGGCACACTTAAGTCCCTGTTA |
| | GGCAGACGAAGCCTTCCCTTCATCCCGAAGTTCATCGAGCTTTGGCAACA |
| | GGCAGGCAGCTTTATCAGCAGCTTGGCAACATTCTGTAAAAGCAGCTTTA |
| | TACCTTTAAGCAAAGAAAAGGAGTTCCGGGGCATAAAAGTAAGGATGTC |
| | TTCTGGCAATTTATAATAAGTATTTTTTCAAAAATGTCTCTTCATTGTCAT |
| | GAAAAGCAGTGCATCACACATCAACCTCTGGTCTCACCAATCGGGGGAG |
| | GTTTGGGTTGTTTACTTAGTGTTGCAAGAATTATTTTATTCTCTCAGGTTC |
| | TTGTTTTGCACAGCAGTCAGCTCATTCACCATAGGTTTCACGAAGAGTTG |
| | CTGCGGCCGCCTCGATAATACGACTCACTATAGGGTCGACGATATCAGAT |
| | CTAGGAACCCCTAGTGATGGAGTTGGCCACTCCCTCTCTGCGCGCTCGCT |
| | CGCTCACTGAGGCCGCCCGGGCAAAGCCCGGGCGTCGGGCGACCTTTGG |
| | TCGCCCGGCCTCAGTGAGCGAGCGAGCGCGCAGAGAGGGAGTGG |
| 914 | CCACTCCCTCTATGCGCGCTCGCTCACTCACTCGGCCCTGGAGACCAAAG |
| | GTCTCCAGACTGCCGGCCTCTGGCCGGCAGGGCCGAGTGAGTGAGCGAG |
| | CGCGCATAGAGGGAGTGGGTACCTCCATCATCTAGGTTTGCCAGATCTGA |
| | TATCGGCGCGCCCCTGGGCGCGCCCGAGTCCAACACCCGTGGGAATCCC |
| | ATGGGCACCATGGCCCCTCGCTCCAAAAATGCTTTCGCGTCGCGCAGACA |
| | CTGCTCGGTAGTTTCGGGGATCAGCGTTTGAGTAAGAGCCCGCGTCTGAA |
| | CCCTCCGCGCCGCCCCGGCCCCAGTGGAAAGACGCGCAGGCAAAACGCA |
| | CCACGTGACGGAGCGTGACCGCGCGCCGAGCGCGCGCCAAGGTCGGGCA |
| | GGAAGAGGGCCTATTTCCCATGATTCCTTCATATTTGCATATACGATACA |
| | AGGCTGTTAGAGAGATAATTAGAATTAATTTGACTGTAAACACAAAGAT |
| | ATTAGTACAAAATACGTGACGTAGAAAGTAATAATTTCTTGGGTAGTTTG |
| | CAGTTTTAAAATTATGTTTTAAAATGGACTATCATATGCTTACCGTAACTT |
| | GAAAGTATTTCGATTTCTTGGCTTTATATATCTTGTGGAAAGGACGAAAC |
| | ACCGCACCAGAGTAACAGTCTGAGGTTTAAGAGCTATGCTGGAAACAGC |
| | ATAGCAAGTTTAAATAAGGCTAGTCCGTTATCAACTTGAAAAAGTGGCA |
| | CCGAGTCGGTGCTTTTTTTGCGGCCGCGCTCGGCGCGCCCATATTTGCAT |
| | GTCGCTATGTGTTCTGGGAAATCACCATAAACGTGAAATGTCTTTGGATT |
| | TGGGAATCTTATAAGTTCTGTATGAGACCACGGTACACCGCACCAGAGTA |
| | ACAGTCTGAGGTTTAAGAGCTATGCTGGAAACAGCATAGCAAGTTTAAA |
| | TAAGGCTAGTCCGTTATCAACTTGAAAAAGTGGCACCGAGTCGGTGCTTT |
| | TTTTGCGGCCGCTGACGGCGCGCCCTGCAGTATTTAGCATGCCCCACCCA |
| | TCTGCAAGGCATTCTGGATAGTGTCAAAACAGCCGGAAATCAAGTCCGTT |
| | TATCTCAAACTTTAGCATTTTGGGAATAAATGATATTTGCTATGCTGGTTA |
| | AATTAGATTTTAGTTAAATTTCCTGCTGAAGCTCTAGTACGATAAGTAAC |
| | TTGACCTAAGTGTAAAGTTGAGATTTCCTTCAGGTTTATATAGCTTGTGC |
| | GCCGCCTGGGTACACCGCACCAGAGTAACAGTCTGAGGTTTAAGAGCTA |
| | TGCTGGAAACAGCATAGCAAGTTTAAATAAGGCTAGTCCGTTATCAACTT |
| | GAAAAAGTGGCACCGAGTCGGTGCTTTTTTTGCGGCCGCGCTGTTTAAAC |
| | CAACAAAATCAGCAGCTAATGAAGGCAAGTCAGCAGGTCACTCATCATT |
| | TTCCACTTCGGCAATGCAGTGGGATTATTCCAACAGAGGTTTTTCACAGC |
| | ATTCCTTCAGTTAACTGGAGATCGAATCTTGATTTTCACAGATATACTTG |
| | GCAAGGTCCGCCCTGTCATCAGCACATTCAAGCAGATCTCCATGGCAGCA |
| | TTCCGTGTGGACTTAGGTAAGATCTGTCACTAACTTGGAAACTTCTGCAA |
| | ACTCAGCTTAGGGAAATCTCTGGCTCAGGCGAGCTACTGCCTCAGCTTAG |
| | AAAGCTCTTTCTCCAAATTATTGGAGACTGGCACACTTAAGTCCCTGTTA |
| | GGCAGACGAAGCCTTCCCTTCATCCCGAAGTTCATCGAGCTTTGGCAACA |
| | GGCAGGCAGCTTTATCAGCAGCTTGGCAACATTCTGTAAAAGCAGCTTTA |
| | TACCTTTAAGCAAAGAAAAGGAGTTCCGGGGCATAAAAGTAAGGATGTC |
| | TTCTGGCAATTTATAATAAGTATTTTTTCAAAAATGTCTCTTCATTGTCAT |
| | GAAAAGCAGTGCATCACACATCAACCTCTGGTCTCACCAATCGGGGGAG |
| | GTTTGGGTTGTTTACTTAGTGTTGCAAGAATTATTTTATTCTCTCAGGTTC |
| | TTGTTTTGCACAGCAGTCAGCTCATTCACCATAGGTTTCACGAAGAGTTG |
| | CTGCGGCCGCCTCGATAATACGACTCACTATAGGGTCGACGATATCAGAT |
| | CTAGGAACCCCTAGTGATGGAGTTGGCCACTCCCTCTCTGCGCGCTCGCT |
| | CGCTCACTGAGGCCGCCCGGGCAAAGCCCGGGCGTCGGGCGACCTTTGG |
| | TCGCCCGGCCTCAGTGAGCGAGCGAGCGCGCAGAGAGGGAGTGG |
| 911 | CCTGCAGGCAGCTGCGCGCTCGCTCGCTCACTGAGGCCGCCCGGGCAAA |
| | GCCCGGGCGTCGGGCGACCTTTGGTCGCCCGGCCTCAGTGAGCGAGCGA |
| | GCGCGCAGAGAGGGAGTGGCCAACTCCATCACTAGGGGTTCCTAGATCT |
| | GATATCGGCGCGCCCCTGGGCGCGCCCGAGTCCAACACCCGTGGGAATC |
| | CCATGGGCACCATGGCCCCTCGCTCCAAAAATGCTTTCGCGTCGCGCAGA |
| | CACTGCTCGGTAGTTTCGGGGATCAGCGTTTGAGTAAGAGCCCGCGTCTG |
| | AACCCTCCGCGCCGCCCCGGCCCCAGTGGAAAGACGCGCAGGCAAAACG |
| | CACCACGTGACGGAGCGTGACCGCGCGCCGAGCGCGCGCCAAGGTCGGG |
| | CAGGAAGAGGGCCTATTTCCCATGATTCCTTCATATTTGCATATACGATA |
| | CAAGGCTGTTAGAGAGATAATTAGAATTAATTTGACTGTAAACACAAAG |
| | ATATTAGTACAAAATACGTGACGTAGAAAGTAATAATTTCTTGGGTAGTT |
| | TGCAGTTTTAAAATTATGTTTTAAAATGGACTATCATATGCTTACCGTAA |
| | CTTGAAAGTATTTCGATTTCTTGGCTTTATATATCTTGTGGAAAGGACGA |
| | AACACCGCACTAGAGTAACAGTCTGACGTTTAAGAGCTATGCTGGAAAC |
| | AGCATAGCAAGTTTAAATAAGGCTAGTCCGTTATCAACTTGAAAAAGTG |
| | GCACCGAGTCGGTGCTTTTTTTGCGGCCGCGCTCGGCGCGCCCATATTTG |
| | CATGTCGCTATGTGTTCTGGGAAATCACCATAAACGTGAAATGTCTTTGG |
| | ATTTGGGAATCTTATAAGTTCTGTATGAGACCACGGTACACCGCACTAGA |
| | GTAACAGTCTGACGTTTAAGAGCTATGCTGGAAACAGCATAGCAAGTTT |
| | AAATAAGGCTAGTCCGTTATCAACTTGAAAAAGTGGCACCGAGTCGGTG |
| | CTTTTTTTGCGGCCGCTGACGGCGCGCCCTGCAGTATTTAGCATGCCCCA |
| | CCCATCTGCAAGGCATTCTGGATAGTGTCAAAACAGCCGGAAATCAAGT |
| | CCGTTTATCTCAAACTTTAGCATTTTGGGAATAAATGATATTTGCTATGCT |
| | GGTTAAATTAGATTTTAGTTAAATTTCCTGCTGAAGCTCTAGTACGATAA |
| | GTAACTTGACCTAAGTGTAAAGTTGAGATTTCCTTCAGGTTTATATAGCT |
| | TGTGCGCCGCCTGGGTACACCGCACTAGAGTAACAGTCTGACGTTTAAGA |
| | GCTATGCTGGAAACAGCATAGCAAGTTTAAATAAGGCTAGTCCGTTATCA |
| | ACTTGAAAAAGTGGCACCGAGTCGGTGCTTTTTTTGCGGCCGCGCTTGCG |
| | GCCGCCTCGAGTGATCAAAAAAACCAACACACGCTTCCAATGAAAATAA |
| | ACGATCCTTTATTGCTAGCCTTTACTTGTACAGCTCGTCCATGCCGAGAGT |
| | GATCCCGGCGGCGGTCACGAACTCCAGCAGGACCATGTGATCGCGCTTCT |
| | CGTTGGGGTCTTTGCTCAGGGCGGACTGGGTGCTCAGGTAGTGGTTGTCG |
| | GGCAGCAACACGGGGCCGTCGCCGATGGGGGTGTTCTGCTGGTAGTGGT |
| | CGGCGAGCTGCACGCTGCCGTCCTCGATGTTGTGGCGGATCTTGAAGTTC |
| | ACCTTGATGCCGTTCTTCTGCTTGTCGGCCATGATATAGACGTTGTGGCTG |
| | TTGTAGTTGTACTCCAGCTTGTGCCCCAGGATGTTGCCGTCCTCCTTGAAG |
| | TCGATGCCCTTCAGCTCGATGCGGTTCACCAGGGTGTCGCCCTCGAACTT |
| | CACCTCGGCGCGGGTCTTGTAGTTGCCGTCGTCCTTGAAGAAGATGGTGC |
| | GCTCCTGGACGTAGCCTTCGGGCATGGCGGACTTGAAGAAGTCGTGCTGC |
| | TTCATGTGGTCGGGGTAGCGGCTGAAGCACTGCACGCCGTAGGTCAGGG |
| | TGGTCACGAGGGTGGGCCAGGGCACGGGCAGCTTGCCGGTGGTGCAGAT |
| | GAACTTCAGGGTCAGCTTGCCGTAGGTGGCATCGCCCTCGCCCTCGCCGG |
| | ACACGCTGAACTTGTGGCCGTTTACGTCGCCGTCCAGCTCGACCAGGATG |
| | GGCACCACCCCGGTGAACAGCTCCTCGCCCTTGCTCACCATGGTGGCGAC |
| | CGGTGGATCCCGGGCCCGCGGGGTGGCTTTACCAACAGTACCCGGAATG |
| | CCAAGCTTACTTAGATCGCAGTCTCGACGCTGGCTGGCTCCTGAGTGTCT |
| | GTCTGTGCTGTGGAGGTGGTGGTAGAATGAGGGCAGCCCCTGTGCCCCTG |
| | GGTTATATAGAGGAGCCTACAGGGTGTGACTAGCCAGGAGGGGCTGTCC |
| | CCAGGGAGGGGCCCCTGAGAGCAGATGAGCTTTCAGCTCGTTGCCCGGG |
| | CACCGTGCCCACCCCGGACCCAGGCGTGCAGCTTGCCCAGCCCCATGGC |
| | CTTGTATGGGCTGCCCCAAGGGCTGACTTGCTCACTGGTTCCTAAACTAA |
| | GTGCTGAGTCTAGCTGGCGGGGGACAGCTGGCCCTTCGCCGGGAACATG |
| | GCATGCAGGGTTATTTTTAGAGGCAGCAGGTGTTGGGGGGGGGGGGGCA |
| | GCCACATGTCTGGGTTAATTATAACCAGGCATCTCGGGTGTCCCCAGGCC |
| | TTGCCTCCTTACATGGGCACGTCGACGATATCAGATCTAGGAACCCCTAG |
| | TGATGGAGTTGGCCACTCCCTCTCTGCGCGCTCGCTCGCTCACTGAGGCC |
| | GGGCGACCAAAGGTCGCCCGACGCCCGGGCTTTGCCCGGGCGGCCTCAG |
| | TGAGCGAGCGAGCGCGCAGCTGCCTGCAGG |
| 919 | CCTGCAGGCAGCTGCGCGCTCGCTCGCTCACTGAGGCCGCCCGGGCAAA |
| | GCCCGGGCGTCGGGCGACCTTTGGTCGCCCGGCCTCAGTGAGCGAGCGA |
| | GCGCGCAGAGAGGGAGTGGCCAACTCCATCACTAGGGGTTCCTAGATCT |
| | GATATCGGCGCGCCCCTGGGCGCGCCCGAGTCCAACACCCGTGGGAATC |
| | CCATGGGCACCATGGCCCCTCGCTCCAAAAATGCTTTCGCGTCGCGCAGA |
| | CACTGCTCGGTAGTTTCGGGGATCAGCGTTTGAGTAAGAGCCCGCGTCTG |
| | AACCCTCCGCGCCGCCCCGGCCCCAGTGGAAAGACGCGCAGGCAAAACG |
| | CACCACGTGACGGAGCGTGACCGCGCGCCGAGCGCGCGCCAAGGTCGGG |
| | CAGGAAGAGGGCCTATTTCCCATGATTCCTTCATATTTGCATATACGATA |
| | CAAGGCTGTTAGAGAGATAATTAGAATTAATTTGACTGTAAACACAAAG |
| | ATATTAGTACAAAATACGTGACGTAGAAAGTAATAATTTCTTGGGTAGTT |
| | TGCAGTTTTAAAATTATGTTTTAAAATGGACTATCATATGCTTACCGTAA |
| | CTTGAAAGTATTTCGATTTCTTGGCTTTATATATCTTGTGGAAAGGACGA |
| | AACACCGCACCAGAGTAACAGTCTGACGTTTAAGAGCTATGCTGGAAAC |
| | AGCATAGCAAGTTTAAATAAGGCTAGTCCGTTATCAACTTGAAAAAGTG |
| | GCACCGAGTCGGTGCTTTTTTTGCGGCCGCGCTCGGCGCGCCCATATTTG |
| | CATGTCGCTATGTGTTCTGGGAAATCACCATAAACGTGAAATGTCTTTGG |
| | ATTTGGGAATCTTATAAGTTCTGTATGAGACCACGGTACACCGCACCAGA |
| | GTAACAGTCTGACGTTTAAGAGCTATGCTGGAAACAGCATAGCAAGTTT |
| | AAATAAGGCTAGTCCGTTATCAACTTGAAAAAGTGGCACCGAGTCGGTG |
| | CTTTTTTTGCGGCCGCTGACGGCGCGCCCTGCAGTATTTAGCATGCCCCA |
| | CCCATCTGCAAGGCATTCTGGATAGTGTCAAAACAGCCGGAAATCAAGT |
| | CCGTTTATCTCAAACTTTAGCATTTTGGGAATAAATGATATTTGCTATGCT |
| | GGTTAAATTAGATTTTAGTTAAATTTCCTGCTGAAGCTCTAGTACGATAA |
| | GTAACTTGACCTAAGTGTAAAGTTGAGATTTCCTTCAGGTTTATATAGCT |
| | TGTGCGCCGCCTGGGTACACCGCACCAGAGTAACAGTCTGACGTTTAAG |
| | AGCTATGCTGGAAACAGCATAGCAAGTTTAAATAAGGCTAGTCCGTTATC |
| | AACTTGAAAAAGTGGCACCGAGTCGGTGCTTTTTTTGCGGCCGCGCTGTT |
| | TAAACCAACAAAATCAGCAGCTAATGAAGGCAAGTCAGCAGGTCACTCA |
| | TCATTTTCCACTTCGGCAATGCAGTGGGATTATTCCAACAGAGGTTTTTC |
| | ACAGCATTCCTTCAGTTAACTGGAGATCGAATCTTGATTTTCACAGATAT |
| | ACTTGGCAAGGTCCGCCCTGTCATCAGCACATTCAAGCAGATCTCCATGG |
| | CAGCATTCCGTGTGGACTTAGGTAAGATCTGTCACTAACTTGGAAACTTC |
| | TGCAAACTCAGCTTAGGGAAATCTCTGGCTCAGGCGAGCTACTGCCTCAG |
| | CTTAGAAAGCTCTTTCTCCAAATTATTGGAGACTGGCACACTTAAGTCCC |
| | TGTTAGGCAGACGAAGCCTTCCCTTCATCCCGAAGTTCATCGAGCTTTGG |
| | CAACAGGCAGGCAGCTTTATCAGCAGCTTGGCAACATTCTGTAAAAGCA |
| | GCTTTATACCTTTAAGCAAAGAAAAGGAGTTCCGGGGCATAAAAGTAAG |
| | GATGTCTTCTGGCAATTTATAATAAGTATTTTTTCAAAAATGTCTCTTCAT |
| | TGTCATGAAAAGCAGTGCATCACACATCAACCTCTGGTCTCACCAATCGG |
| | GGGAGGTTTGGGTTGTTTACTTAGTGTTGCAAGAATTATTTTATTCTCTCA |
| | GGTTCTTGTTTTGCACAGCAGTCAGCTCATTCACCATAGGTTTCACGAAG |
| | AGTTGCTGCGGCCGCCTCGATAATACGACTCACTATAGGGTCGACGATAT |
| | CAGATCTAGGAACCCCTAGTGATGGAGTTGGCCACTCCCTCTCTGCGCGC |
| | TCGCTCGCTCACTGAGGCCGGGCGACCAAAGGTCGCCCGACGCCCGGGC |
| | TTTGCCCGGGCGGCCTCAGTGAGCGAGCGAGCGCGCAGCTGCCTGCAGG |
| 915 | CCTGCAGGCAGCTGCGCGCTCGCTCGCTCACTGAGGCCGCCCGGGCAAA |
| | GCCCGGGCGTCGGGCGACCTTTGGTCGCCCGGCCTCAGTGAGCGAGCGA |
| | GCGCGCAGAGAGGGAGTGGCCAACTCCATCACTAGGGGTTCCTAGATCT |
| | GATATCGGCGCGCCCCTGGGCGCGCCCGAGTCCAACACCCGTGGGAATC |
| | CCATGGGCACCATGGCCCCTCGCTCCAAAAATGCTTTCGCGTCGCGCAGA |
| | CACTGCTCGGTAGTTTCGGGGATCAGCGTTTGAGTAAGAGCCCGCGTCTG |
| | AACCCTCCGCGCCGCCCCGGCCCCAGTGGAAAGACGCGCAGGCAAAACG |
| | CACCACGTGACGGAGCGTGACCGCGCGCCGAGCGCGCGCCAAGGTCGGG |
| | CAGGAAGAGGGCCTATTTCCCATGATTCCTTCATATTTGCATATACGATA |
| | CAAGGCTGTTAGAGAGATAATTAGAATTAATTTGACTGTAAACACAAAG |
| | ATATTAGTACAAAATACGTGACGTAGAAAGTAATAATTTCTTGGGTAGTT |
| | TGCAGTTTTAAAATTATGTTTTAAAATGGACTATCATATGCTTACCGTAA |
| | CTTGAAAGTATTTCGATTTCTTGGCTTTATATATCTTGTGGAAAGGACGA |
| | AACACCGCACCAGAGTAACAGTCTGAGGTTTAAGAGCTATGCTGGAAAC |
| | AGCATAGCAAGTTTAAATAAGGCTAGTCCGTTATCAACTTGAAAAAGTG |
| | GCACCGAGTCGGTGCTTTTTTTGCGGCCGCGCTCGGCGCGCCCATATTTG |
| | CATGTCGCTATGTGTTCTGGGAAATCACCATAAACGTGAAATGTCTTTGG |
| | ATTTGGGAATCTTATAAGTTCTGTATGAGACCACGGTACACCGCACCAGA |
| | GTAACAGTCTGAGGTTTAAGAGCTATGCTGGAAACAGCATAGCAAGTTT |
| | AAATAAGGCTAGTCCGTTATCAACTTGAAAAAGTGGCACCGAGTCGGTG |
| | CTTTTTTTGCGGCCGCTGACGGCGCGCCCTGCAGTATTTAGCATGCCCCA |
| | CCCATCTGCAAGGCATTCTGGATAGTGTCAAAACAGCCGGAAATCAAGT |
| | CCGTTTATCTCAAACTTTAGCATTTTGGGAATAAATGATATTTGCTATGCT |
| | GGTTAAATTAGATTTTAGTTAAATTTCCTGCTGAAGCTCTAGTACGATAA |
| | GTAACTTGACCTAAGTGTAAAGTTGAGATTTCCTTCAGGTTTATATAGCT |
| | TGTGCGCCGCCTGGGTACACCGCACCAGAGTAACAGTCTGAGGTTTAAG |
| | AGCTATGCTGGAAACAGCATAGCAAGTTTAAATAAGGCTAGTCCGTTATC |
| | AACTTGAAAAAGTGGCACCGAGTCGGTGCTTTTTTTGCGGCCGCGCTGTT |
| | TAAACCAACAAAATCAGCAGCTAATGAAGGCAAGTCAGCAGGTCACTCA |
| | TCATTTTCCACTTCGGCAATGCAGTGGGATTATTCCAACAGAGGTTTTTC |
| | ACAGCATTCCTTCAGTTAACTGGAGATCGAATCTTGATTTTCACAGATAT |
| | ACTTGGCAAGGTCCGCCCTGTCATCAGCACATTCAAGCAGATCTCCATGG |
| | CAGCATTCCGTGTGGACTTAGGTAAGATCTGTCACTAACTTGGAAACTTC |
| | TGCAAACTCAGCTTAGGGAAATCTCTGGCTCAGGCGAGCTACTGCCTCAG |
| | CTTAGAAAGCTCTTTCTCCAAATTATTGGAGACTGGCACACTTAAGTCCC |
| | TGTTAGGCAGACGAAGCCTTCCCTTCATCCCGAAGTTCATCGAGCTTTGG |
| | CAACAGGCAGGCAGCTTTATCAGCAGCTTGGCAACATTCTGTAAAAGCA |
| | GCTTTATACCTTTAAGCAAAGAAAAGGAGTTCCGGGGCATAAAAGTAAG |
| | GATGTCTTCTGGCAATTTATAATAAGTATTTTTTCAAAAATGTCTCTTCAT |
| | TGTCATGAAAAGCAGTGCATCACACATCAACCTCTGGTCTCACCAATCGG |
| | GGGAGGTTTGGGTTGTTTACTTAGTGTTGCAAGAATTATTTTATTCTCTCA |
| | GGTTCTTGTTTTGCACAGCAGTCAGCTCATTCACCATAGGTTTCACGAAG |
| | AGTTGCTGCGGCCGCCTCGATAATACGACTCACTATAGGGTCGACGATAT |
| | CAGATCTAGGAACCCCTAGTGATGGAGTTGGCCACTCCCTCTCTGCGCGC |
| | TCGCTCGCTCACTGAGGCCGGGCGACCAAAGGTCGCCCGACGCCCGGGC |
| | TTTGCCCGGGCGGCCTCAGTGAGCGAGCGAGCGCGCAGCTGCCTGCAGG |
| 912 | AAGATGACGGTTTGTCACATGGAGTTGGCAGGATGTTTGATTAAAAACAT |
| | AACAGGAAGAAAAATGCCCCGCTGTGGGCGGACAAAATAGTTGGGAACT |
| | GGGAGGGGTGGAAATGGAGTTTTTAAGGATTATTTAGGGAAGAGTGACA |
| | AAATAGATGGGAACTGGGTGTAGCGTCGTAAGCTAATACGAAAATTAAA |
| | AATGACAAAATAGTTTGGAACTAGATTTCACTTATCTGGTTCGGATCTCC |
| | TAGGCGATATCAGTGATCACGGATCTCGACCAATTGACATTATTGAAGCA |
| | ACTAGTATCGATTTTATCAGGGTTATTGTCTCAGACCTGCAGGCAGCTGC |
| | GCGCTCGCTCGCTCACTGAGGCCGCCCGGGCAAAGCCCGGGCGTCGGGC |
| | GACCTTTGGTCGCCCGGCCTCAGTGAGCGAGCGAGCGCGCAGAGAGGGA |
| | GTGGCCAACTCCATCACTAGGGGTTCCTAGATCTGATATCGGCGCGCCCC |
| | TGGGCGCGCCCGAGTCCAACACCCGTGGGAATCCCATGGGCACCATGGC |
| | CCCTCGCTCCAAAAATGCTTTCGCGTCGCGCAGACACTGCTCGGTAGTTT |
| | CGGGGATCAGCGTTTGAGTAAGAGCCCGCGTCTGAACCCTCCGCGCCGC |
| | CCCGGCCCCAGTGGAAAGACGCGCAGGCAAAACGCACCACGTGACGGA |
| | GCGTGACCGCGCGCCGAGCGCGCGCCAAGGTCGGGCAGGAAGAGGGCCT |
| | ATTTCCCATGATTCCTTCATATTTGCATATACGATACAAGGCTGTTAGAG |
| | AGATAATTAGAATTAATTTGACTGTAAACACAAAGATATTAGTACAAAA |
| | TACGTGACGTAGAAAGTAATAATTTCTTGGGTAGTTTGCAGTTTTAAAAT |
| | TATGTTTTAAAATGGACTATCATATGCTTACCGTAACTTGAAAGTATTTC |
| | GATTTCTTGGCTTTATATATCTTGTGGAAAGGACGAAACACCGCACTAGA |
| | GTAACAGTCTGACGTTTAAGAGCTATGCTGGAAACAGCATAGCAAGTTT |
| | AAATAAGGCTAGTCCGTTATCAACTTGAAAAAGTGGCACCGAGTCGGTG |
| | CTTTTTTTGCGGCCGCGCTTCGGCGCGCCCATATTTGCATGTCGCTATGTG |
| | TTCTGGGAAATCACCATAAACGTGAAATGTCTTTGGATTTGGGAATCTTA |
| | TAAGTTCTGTATGAGACCACGGTACACCGCACTAGAGTAACAGTCTGAC |
| | GTTTAAGAGCTATGCTGGAAACAGCATAGCAAGTTTAAATAAGGCTAGT |
| | CCGTTATCAACTTGAAAAAGTGGCACCGAGTCGGTGCTTTTTTTGCGGCC |
| | GCTGACGGCGCGCCCTGCAGTATTTAGCATGCCCCACCCATCTGCAAGGC |
| | ATTCTGGATAGTGTCAAAACAGCCGGAAATCAAGTCCGTTTATCTCAAAC |
| | TTTAGCATTTTGGGAATAAATGATATTTGCTATGCTGGTTAAATTAGATTT |
| | TAGTTAAATTTCCTGCTGAAGCTCTAGTACGATAAGTAACTTGACCTAAG |
| | TGTAAAGTTGAGATTTCCTTCAGGTTTATATAGCTTGTGCGCCGCCTGGG |
| | TACACCGCACTAGAGTAACAGTCTGACGTTTAAGAGCTATGCTGGAAAC |
| | AGCATAGCAAGTTTAAATAAGGCTAGTCCGTTATCAACTTGAAAAAGTG |
| | GCACCGAGTCGGTGCTTTTTTTGCGGCCGCGCTGCGGCCGCCTCGAGTGA |
| | TCAAAAAAACCAACACACGCTTCCAATGAAAATAAACGATCCTTTATTGC |
| | TAGCCTTTACTTGTACAGCTCGTCCATGCCGAGAGTGATCCCGGCGGCGG |
| | TCACGAACTCCAGCAGGACCATGTGATCGCGCTTCTCGTTGGGGTCTTTG |
| | CTCAGGGCGGACTGGGTGCTCAGGTAGTGGTTGTCGGGCAGCAACACGG |
| | GGCCGTCGCCGATGGGGGTGTTCTGCTGGTAGTGGTCGGCGAGCTGCAC |
| | GCTGCCGTCCTCGATGTTGTGGCGGATCTTGAAGTTCACCTTGATGCCGT |
| | TCTTCTGCTTGTCGGCCATGATATAGACGTTGTGGCTGTTGTAGTTGTACT |
| | CCAGCTTGTGCCCCAGGATGTTGCCGTCCTCCTTGAAGTCGATGCCCTTC |
| | AGCTCGATGCGGTTCACCAGGGTGTCGCCCTCGAACTTCACCTCGGCGCG |
| | GGTCTTGTAGTTGCCGTCGTCCTTGAAGAAGATGGTGCGCTCCTGGACGT |
| | AGCCTTCGGGCATGGCGGACTTGAAGAAGTCGTGCTGCTTCATGTGGTCG |
| | GGGTAGCGGCTGAAGCACTGCACGCCGTAGGTCAGGGTGGTCACGAGGG |
| | TGGGCCAGGGCACGGGCAGCTTGCCGGTGGTGCAGATGAACTTCAGGGT |
| | CAGCTTGCCGTAGGTGGCATCGCCCTCGCCCTCGCCGGACACGCTGAACT |
| | TGTGGCCGTTTACGTCGCCGTCCAGCTCGACCAGGATGGGCACCACCCCG |
| | GTGAACAGCTCCTCGCCCTTGCTCACCATGGTGGCGACCGGTGGATCCCG |
| | GGCCCGCGGGGTGGCTTTACCAACAGTACCCGGAATGCCAAGCTTACTTA |
| | GATCGCAGTCTCGACGCTGGCTGGCTCCTGAGTGTCTGTCTGTGCTGTGG |
| | AGGTGGTGGTAGAATGAGGGCAGCCCCTGTGCCCCTGGGTTATATAGAG |
| | GAGCCTACAGGGTGTGACTAGCCAGGAGGGGCTGTCCCCAGGGAGGGGC |
| | CCCTGAGAGCAGATGAGCTTTCAGCTCGTTGCCCGGGCACCGTGCCCACC |
| | CCGGACCCAGGCGTGCAGCTTGCCCAGCCCCATGGCCTTGTATGGGCTGC |
| | CCCAAGGGCTGACTTGCTCACTGGTTCCTAAACTAAGTGCTGAGTCTAGC |
| | TGGCGGGGGACAGCTGGCCCTTCGCCGGGAACATGGCATGCAGGGTTAT |
| | TTTTAGAGGCAGCAGGTGTTGGGGGGGGGGGGGCAGCCACATGTCTGGG |
| | TTAATTATAACCAGGCATCTCGGGTGTCCCCAGGCCTTGCCTCCTTACAT |
| | GGGCACGTCGACGATATCAGATCTAGGAACCCCTAGTGATGGAGTTGGC |
| | CACTCCCTCTCTGCGCGCTCGCTCGCTCACTGAGGCCGGGCGACCAAAGG |
| | TCGCCCGACGCCCGGGCTTTGCCCGGGCGGCCTCAGTGAGCGAGCGAGC |
| | GCGCAGCTGCCTGCAGGCATGCAAGCTGTAGCCAACCACTAGAACTATA |
| | GCTAGAGTCCTGGGCGAACAAACGATGCTCGCCTTCCAGAAAACCGAGG |
| | ATGCGAACCACTTCATCCGGGGTCAGCACCACCGGCAAGCGCCGCGACG |
| | GCCGAGGTCTTCCGATCTCCTGAAGCCAGGGCAGATCCGTGCACAGCAC |
| | CTTGCCGTAGAAGAACAGCAAGGCCGCCAATGCCTGACGATGCGTGGAG |
| | ACCGAAACCTTGCGCTCGTTCGCCAGCCAGGACAGAAATGCCTCGACTTC |
| | GCTGCTGCCCAAGGTTGCCGGGTGACGCACACCGTGGAAACGGATGAAG |
| | GCACGAACCCAGTTGACATAAGCCTGTTCGGTTCGTAAACTGTAATGCAA |
| | GTAGCGTATGCGCTCACGCAACTGGTCCAGAACCTTGACCGAACGCAGC |
| | GGTGGTAACGGCGCAGTGGCGGTTTTCATGGCTTGTTATGACTGTTTTTTT |
| | GTACAGTCTATGCCTCGGGCATCCAAGCAGCAAGCGCGTTACGCCGTGG |
| | GTCGATGTTTGATGTTATGGAGCAGCAACGATGTTACGCAGCAGCAACG |
| | ATGTTACGCAGCAGGGCAGTCGCCCTAAAACAAAGTTAGGTGGCTCAAG |
| | TATGGGCATCATTCGCACATGTAGGCTCGGCCCTGACCAAGTCAAATCCA |
| | TGCGGGCTGCTCTTGATCTTTTCGGTCGTGAGTTCGGAGACGTAGCCACC |
| | TACTCCCAACATCAGCCGGACTCCGATTACCTCGGGAACTTGCTCCGTAG |
| | TAAGACATTCATCGCGCTTGCTGCCTTCGACCAAGAAGCGGTTGTTGGCG |
| | CTCTCGCGGCTTACGTTCTGCCCAAGTTTGAGCAGCCGCGTAGTGAGATC |
| | TATATCTATGATCTCGCAGTCTCCGGCGAGCACCGGAGGCAGGGCATTGC |
| | CACCGCGCTCATCAATCTCCTCAAGCATGAGGCCAACGCGCTTGGTGCTT |
| | ATGTGATCTACGTGCAAGCAGATTACGGTGACGATCCCGCAGTGGCTCTC |
| | TATACAAAGTTGGGCATACGGGAAGAAGTGATGCACTTTGATATCGACC |
| | CAAGTACCGCCACCTAACAATTCGTTCAAGCCGAGATCGGCTTCCCGGCC |
| | GCGGAGTTGTTCGGTAAATTGTCACAACGCCGCGAATATAGTCTTTACCA |
| | TGCCCTTGGCCACGCCCCTCTTTAATACGACGGGCAATTTGCACTTCAGA |
| | AAATGAAGAGTTTGCTTTAGCCATAACAAAAGTCCAGTATGCTTTTTCAC |
| | AGCATAACTGGACTGATTTCAGTTTACAACTATTCTGTCTAGTTTAAGAC |
| | TTTATTGTCATAGTTTAGATCTATTTTGTTCAGTTTAAGACTTTATTGTCC |
| | GCCCACACCCGCTTACGC |
| 920 | AAGATGACGGTTTGTCACATGGAGTTGGCAGGATGTTTGATTAAAAACAT |
| | AACAGGAAGAAAAATGCCCCGCTGTGGGCGGACAAAATAGTTGGGAACT |
| | GGGAGGGGTGGAAATGGAGTTTTTAAGGATTATTTAGGGAAGAGTGACA |
| | AAATAGATGGGAACTGGGTGTAGCGTCGTAAGCTAATACGAAAATTAAA |
| | AATGACAAAATAGTTTGGAACTAGATTTCACTTATCTGGTTCGGATCTCC |
| | TAGGCGATATCAGTGATCACGGATCTCGACCAATTGACATTATTGAAGCA |
| | ACTAGTATCGATTTTATCAGGGTTATTGTCTCAGACCTGCAGGCAGCTGC |
| | GCGCTCGCTCGCTCACTGAGGCCGCCCGGGCAAAGCCCGGGCGTCGGGC |
| | GACCTTTGGTCGCCCGGCCTCAGTGAGCGAGCGAGCGCGCAGAGAGGGA |
| | GTGGCCAACTCCATCACTAGGGGTTCCTAGATCTGATATCGGCGCGCCCC |
| | TGGGCGCGCCCGAGTCCAACACCCGTGGGAATCCCATGGGCACCATGGC |
| | CCCTCGCTCCAAAAATGCTTTCGCGTCGCGCAGACACTGCTCGGTAGTTT |
| | CGGGGATCAGCGTTTGAGTAAGAGCCCGCGTCTGAACCCTCCGCGCCGC |
| | CCCGGCCCCAGTGGAAAGACGCGCAGGCAAAACGCACCACGTGACGGA |
| | GCGTGACCGCGCGCCGAGCGCGCGCCAAGGTCGGGCAGGAAGAGGGCCT |
| | ATTTCCCATGATTCCTTCATATTTGCATATACGATACAAGGCTGTTAGAG |
| | AGATAATTAGAATTAATTTGACTGTAAACACAAAGATATTAGTACAAAA |
| | TACGTGACGTAGAAAGTAATAATTTCTTGGGTAGTTTGCAGTTTTAAAAT |
| | TATGTTTTAAAATGGACTATCATATGCTTACCGTAACTTGAAAGTATTTC |
| | GATTTCTTGGCTTTATATATCTTGTGGAAAGGACGAAACACCGCACCAGA |
| | GTAACAGTCTGACGTTTAAGAGCTATGCTGGAAACAGCATAGCAAGTTT |
| | AAATAAGGCTAGTCCGTTATCAACTTGAAAAAGTGGCACCGAGTCGGTG |
| | CTTTTTTTGCGGCCGCGCTCGGCGCGCCCATATTTGCATGTCGCTATGTGT |
| | TCTGGGAAATCACCATAAACGTGAAATGTCTTTGGATTTGGGAATCTTAT |
| | AAGTTCTGTATGAGACCACGGTACACCGCACCAGAGTAACAGTCTGACG |
| | TTTAAGAGCTATGCTGGAAACAGCATAGCAAGTTTAAATAAGGCTAGTC |
| | CGTTATCAACTTGAAAAAGTGGCACCGAGTCGGTGCTTTTTTTGCGGCCG |
| | CTGACGGCGCGCCCTGCAGTATTTAGCATGCCCCACCCATCTGCAAGGCA |
| | TTCTGGATAGTGTCAAAACAGCCGGAAATCAAGTCCGTTTATCTCAAACT |
| | TTAGCATTTTGGGAATAAATGATATTTGCTATGCTGGTTAAATTAGATTTT |
| | AGTTAAATTTCCTGCTGAAGCTCTAGTACGATAAGTAACTTGACCTAAGT |
| | GTAAAGTTGAGATTTCCTTCAGGTTTATATAGCTTGTGCGCCGCCTGGGT |
| | ACACCGCACCAGAGTAACAGTCTGACGTTTAAGAGCTATGCTGGAAACA |
| | GCATAGCAAGTTTAAATAAGGCTAGTCCGTTATCAACTTGAAAAAGTGG |
| | CACCGAGTCGGTGCTTTTTTTGCGGCCGCGCTGTTTAAACCAACAAAATC |
| | AGCAGCTAATGAAGGCAAGTCAGCAGGTCACTCATCATTTTCCACTTCGG |
| | CAATGCAGTGGGATTATTCCAACAGAGGTTTTTCACAGCATTCCTTCAGT |
| | TAACTGGAGATCGAATCTTGATTTTCACAGATATACTTGGCAAGGTCCGC |
| | CCTGTCATCAGCACATTCAAGCAGATCTCCATGGCAGCATTCCGTGTGGA |
| | CTTAGGTAAGATCTGTCACTAACTTGGAAACTTCTGCAAACTCAGCTTAG |
| | GGAAATCTCTGGCTCAGGCGAGCTACTGCCTCAGCTTAGAAAGCTCTTTC |
| | TCCAAATTATTGGAGACTGGCACACTTAAGTCCCTGTTAGGCAGACGAAG |
| | CCTTCCCTTCATCCCGAAGTTCATCGAGCTTTGGCAACAGGCAGGCAGCT |
| | TTATCAGCAGCTTGGCAACATTCTGTAAAAGCAGCTTTATACCTTTAAGC |
| | AAAGAAAAGGAGTTCCGGGGCATAAAAGTAAGGATGTCTTCTGGCAATT |
| | TATAATAAGTATTTTTTCAAAAATGTCTCTTCATTGTCATGAAAAGCAGT |
| | GCATCACACATCAACCTCTGGTCTCACCAATCGGGGGAGGTTTGGGTTGT |
| | TTACTTAGTGTTGCAAGAATTATTTTATTCTCTCAGGTTCTTGTTTTGCAC |
| | AGCAGTCAGCTCATTCACCATAGGTTTCACGAAGAGTTGCTGCGGCCGCC |
| | TCGATAATACGACTCACTATAGGGTCGACGATATCAGATCTAGGAACCCC |
| | TAGTGATGGAGTTGGCCACTCCCTCTCTGCGCGCTCGCTCGCTCACTGAG |
| | GCCGGGCGACCAAAGGTCGCCCGACGCCCGGGCTTTGCCCGGGCGGCCT |
| | CAGTGAGCGAGCGAGCGCGCAGCTGCCTGCAGGCATGCAAGCTGTAGCC |
| | AACCACTAGAACTATAGCTAGAGTCCTGGGCGAACAAACGATGCTCGCC |
| | TTCCAGAAAACCGAGGATGCGAACCACTTCATCCGGGGTCAGCACCACC |
| | GGCAAGCGCCGCGACGGCCGAGGTCTTCCGATCTCCTGAAGCCAGGGCA |
| | GATCCGTGCACAGCACCTTGCCGTAGAAGAACAGCAAGGCCGCCAATGC |
| | CTGACGATGCGTGGAGACCGAAACCTTGCGCTCGTTCGCCAGCCAGGAC |
| | AGAAATGCCTCGACTTCGCTGCTGCCCAAGGTTGCCGGGTGACGCACACC |
| | GTGGAAACGGATGAAGGCACGAACCCAGTTGACATAAGCCTGTTCGGTT |
| | CGTAAACTGTAATGCAAGTAGCGTATGCGCTCACGCAACTGGTCCAGAA |
| | CCTTGACCGAACGCAGCGGTGGTAACGGCGCAGTGGCGGTTTTCATGGCT |
| | TGTTATGACTGTTTTTTTGTACAGTCTATGCCTCGGGCATCCAAGCAGCA |
| | AGCGCGTTACGCCGTGGGTCGATGTTTGATGTTATGGAGCAGCAACGATG |
| | TTACGCAGCAGCAACGATGTTACGCAGCAGGGCAGTCGCCCTAAAACAA |
| | AGTTAGGTGGCTCAAGTATGGGCATCATTCGCACATGTAGGCTCGGCCCT |
| | GACCAAGTCAAATCCATGCGGGCTGCTCTTGATCTTTTCGGTCGTGAGTT |
| | CGGAGACGTAGCCACCTACTCCCAACATCAGCCGGACTCCGATTACCTCG |
| | GGAACTTGCTCCGTAGTAAGACATTCATCGCGCTTGCTGCCTTCGACCAA |
| | GAAGCGGTTGTTGGCGCTCTCGCGGCTTACGTTCTGCCCAAGTTTGAGCA |
| | GCCGCGTAGTGAGATCTATATCTATGATCTCGCAGTCTCCGGCGAGCACC |
| | GGAGGCAGGGCATTGCCACCGCGCTCATCAATCTCCTCAAGCATGAGGC |
| | CAACGCGCTTGGTGCTTATGTGATCTACGTGCAAGCAGATTACGGTGACG |
| | ATCCCGCAGTGGCTCTCTATACAAAGTTGGGCATACGGGAAGAAGTGAT |
| | GCACTTTGATATCGACCCAAGTACCGCCACCTAACAATTCGTTCAAGCCG |
| | AGATCGGCTTCCCGGCCGCGGAGTTGTTCGGTAAATTGTCACAACGCCGC |
| | GAATATAGTCTTTACCATGCCCTTGGCCACGCCCCTCTTTAATACGACGG |
| | GCAATTTGCACTTCAGAAAATGAAGAGTTTGCTTTAGCCATAACAAAAGT |
| | CCAGTATGCTTTTTCACAGCATAACTGGACTGATTTCAGTTTACAACTATT |
| | CTGTCTAGTTTAAGACTTTATTGTCATAGTTTAGATCTATTTTGTTCAGTT |
| | TAAGACTTTATTGTCCGCCCACACCCGCTTACGC |
| 916 | AAGATGACGGTTTGTCACATGGAGTTGGCAGGATGTTTGATTAAAAACAT |
| | AACAGGAAGAAAAATGCCCCGCTGTGGGCGGACAAAATAGTTGGGAACT |
| | GGGAGGGGTGGAAATGGAGTTTTTAAGGATTATTTAGGGAAGAGTGACA |
| | AAATAGATGGGAACTGGGTGTAGCGTCGTAAGCTAATACGAAAATTAAA |
| | AATGACAAAATAGTTTGGAACTAGATTTCACTTATCTGGTTCGGATCTCC |
| | TAGGCGATATCAGTGATCACGGATCTCGACCAATTGACATTATTGAAGCA |
| | ACTAGTATCGATTTTATCAGGGTTATTGTCTCAGACCTGCAGGCAGCTGC |
| | GCGCTCGCTCGCTCACTGAGGCCGCCCGGGCAAAGCCCGGGCGTCGGGC |
| | GACCTTTGGTCGCCCGGCCTCAGTGAGCGAGCGAGCGCGCAGAGAGGGA |
| | GTGGCCAACTCCATCACTAGGGGTTCCTAGATCTGATATCGGCGCGCCCC |
| | TGGGCGCGCCCGAGTCCAACACCCGTGGGAATCCCATGGGCACCATGGC |
| | CCCTCGCTCCAAAAATGCTTTCGCGTCGCGCAGACACTGCTCGGTAGTTT |
| | CGGGGATCAGCGTTTGAGTAAGAGCCCGCGTCTGAACCCTCCGCGCCGC |
| | CCCGGCCCCAGTGGAAAGACGCGCAGGCAAAACGCACCACGTGACGGA |
| | GCGTGACCGCGCGCCGAGCGCGCGCCAAGGTCGGGCAGGAAGAGGGCCT |
| | ATTTCCCATGATTCCTTCATATTTGCATATACGATACAAGGCTGTTAGAG |
| | AGATAATTAGAATTAATTTGACTGTAAACACAAAGATATTAGTACAAAA |
| | TACGTGACGTAGAAAGTAATAATTTCTTGGGTAGTTTGCAGTTTTAAAAT |
| | TATGTTTTAAAATGGACTATCATATGCTTACCGTAACTTGAAAGTATTTC |
| | GATTTCTTGGCTTTATATATCTTGTGGAAAGGACGAAACACCGCACCAGA |
| | GTAACAGTCTGAGGTTTAAGAGCTATGCTGGAAACAGCATAGCAAGTTT |
| | AAATAAGGCTAGTCCGTTATCAACTTGAAAAAGTGGCACCGAGTCGGTG |
| | CTTTTTTTGCGGCCGCGCTCGGCGCGCCCATATTTGCATGTCGCTATGTGT |
| | TCTGGGAAATCACCATAAACGTGAAATGTCTTTGGATTTGGGAATCTTAT |
| | AAGTTCTGTATGAGACCACGGTACACCGCACCAGAGTAACAGTCTGAGG |
| | TTTAAGAGCTATGCTGGAAACAGCATAGCAAGTTTAAATAAGGCTAGTC |
| | CGTTATCAACTTGAAAAAGTGGCACCGAGTCGGTGCTTTTTTTGCGGCCG |
| | CTGACGGCGCGCCCTGCAGTATTTAGCATGCCCCACCCATCTGCAAGGCA |
| | TTCTGGATAGTGTCAAAACAGCCGGAAATCAAGTCCGTTTATCTCAAACT |
| | TTAGCATTTTGGGAATAAATGATATTTGCTATGCTGGTTAAATTAGATTTT |
| | AGTTAAATTTCCTGCTGAAGCTCTAGTACGATAAGTAACTTGACCTAAGT |
| | GTAAAGTTGAGATTTCCTTCAGGTTTATATAGCTTGTGCGCCGCCTGGGT |
| | ACACCGCACCAGAGTAACAGTCTGAGGTTTAAGAGCTATGCTGGAAACA |
| | GCATAGCAAGTTTAAATAAGGCTAGTCCGTTATCAACTTGAAAAAGTGG |
| | CACCGAGTCGGTGCTTTTTTTGCGGCCGCGCTGTTTAAACCAACAAAATC |
| | AGCAGCTAATGAAGGCAAGTCAGCAGGTCACTCATCATTTTCCACTTCGG |
| | CAATGCAGTGGGATTATTCCAACAGAGGTTTTTCACAGCATTCCTTCAGT |
| | TAACTGGAGATCGAATCTTGATTTTCACAGATATACTTGGCAAGGTCCGC |
| | CCTGTCATCAGCACATTCAAGCAGATCTCCATGGCAGCATTCCGTGTGGA |
| | CTTAGGTAAGATCTGTCACTAACTTGGAAACTTCTGCAAACTCAGCTTAG |
| | GGAAATCTCTGGCTCAGGCGAGCTACTGCCTCAGCTTAGAAAGCTCTTTC |
| | TCCAAATTATTGGAGACTGGCACACTTAAGTCCCTGTTAGGCAGACGAAG |
| | CCTTCCCTTCATCCCGAAGTTCATCGAGCTTTGGCAACAGGCAGGCAGCT |
| | TTATCAGCAGCTTGGCAACATTCTGTAAAAGCAGCTTTATACCTTTAAGC |
| | AAAGAAAAGGAGTTCCGGGGCATAAAAGTAAGGATGTCTTCTGGCAATT |
| | TATAATAAGTATTTTTTCAAAAATGTCTCTTCATTGTCATGAAAAGCAGT |
| | GCATCACACATCAACCTCTGGTCTCACCAATCGGGGGAGGTTTGGGTTGT |
| | TTACTTAGTGTTGCAAGAATTATTTTATTCTCTCAGGTTCTTGTTTTGCAC |
| | AGCAGTCAGCTCATTCACCATAGGTTTCACGAAGAGTTGCTGCGGCCGCC |
| | TCGATAATACGACTCACTATAGGGTCGACGATATCAGATCTAGGAACCCC |
| | TAGTGATGGAGTTGGCCACTCCCTCTCTGCGCGCTCGCTCGCTCACTGAG |
| | GCCGGGCGACCAAAGGTCGCCCGACGCCCGGGCTTTGCCCGGGCGGCCT |
| | CAGTGAGCGAGCGAGCGCGCAGCTGCCTGCAGGCATGCAAGCTGTAGCC |
| | AACCACTAGAACTATAGCTAGAGTCCTGGGCGAACAAACGATGCTCGCC |
| | TTCCAGAAAACCGAGGATGCGAACCACTTCATCCGGGGTCAGCACCACC |
| | GGCAAGCGCCGCGACGGCCGAGGTCTTCCGATCTCCTGAAGCCAGGGCA |
| | GATCCGTGCACAGCACCTTGCCGTAGAAGAACAGCAAGGCCGCCAATGC |
| | CTGACGATGCGTGGAGACCGAAACCTTGCGCTCGTTCGCCAGCCAGGAC |
| | AGAAATGCCTCGACTTCGCTGCTGCCCAAGGTTGCCGGGTGACGCACACC |
| | GTGGAAACGGATGAAGGCACGAACCCAGTTGACATAAGCCTGTTCGGTT |
| | CGTAAACTGTAATGCAAGTAGCGTATGCGCTCACGCAACTGGTCCAGAA |
| | CCTTGACCGAACGCAGCGGTGGTAACGGCGCAGTGGCGGTTTTCATGGCT |
| | TGTTATGACTGTTTTTTTGTACAGTCTATGCCTCGGGCATCCAAGCAGCA |
| | AGCGCGTTACGCCGTGGGTCGATGTTTGATGTTATGGAGCAGCAACGATG |
| | TTACGCAGCAGCAACGATGTTACGCAGCAGGGCAGTCGCCCTAAAACAA |
| | AGTTAGGTGGCTCAAGTATGGGCATCATTCGCACATGTAGGCTCGGCCCT |
| | GACCAAGTCAAATCCATGCGGGCTGCTCTTGATCTTTTCGGTCGTGAGTT |
| | CGGAGACGTAGCCACCTACTCCCAACATCAGCCGGACTCCGATTACCTCG |
| | GGAACTTGCTCCGTAGTAAGACATTCATCGCGCTTGCTGCCTTCGACCAA |
| | GAAGCGGTTGTTGGCGCTCTCGCGGCTTACGTTCTGCCCAAGTTTGAGCA |
| | GCCGCGTAGTGAGATCTATATCTATGATCTCGCAGTCTCCGGCGAGCACC |
| | GGAGGCAGGGCATTGCCACCGCGCTCATCAATCTCCTCAAGCATGAGGC |
| | CAACGCGCTTGGTGCTTATGTGATCTACGTGCAAGCAGATTACGGTGACG |
| | ATCCCGCAGTGGCTCTCTATACAAAGTTGGGCATACGGGAAGAAGTGAT |
| | GCACTTTGATATCGACCCAAGTACCGCCACCTAACAATTCGTTCAAGCCG |
| | AGATCGGCTTCCCGGCCGCGGAGTTGTTCGGTAAATTGTCACAACGCCGC |
| | GAATATAGTCTTTACCATGCCCTTGGCCACGCCCCTCTTTAATACGACGG |
| | GCAATTTGCACTTCAGAAAATGAAGAGTTTGCTTTAGCCATAACAAAAGT |
| | CCAGTATGCTTTTTCACAGCATAACTGGACTGATTTCAGTTTACAACTATT |
| | CTGTCTAGTTTAAGACTTTATTGTCATAGTTTAGATCTATTTTGTTCAGTT |
| | TAAGACTTTATTGTCCGCCCACACCCGCTTACGC |
| 913 | AAGATGACGGTTTGTCACATGGAGTTGGCAGGATGTTTGATTAAAAACAT |
| | AACAGGAAGAAAAATGCCCCGCTGTGGGCGGACAAAATAGTTGGGAACT |
| | GGGAGGGGTGGAAATGGAGTTTTTAAGGATTATTTAGGGAAGAGTGACA |
| | AAATAGATGGGAACTGGGTGTAGCGTCGTAAGCTAATACGAAAATTAAA |
| | AATGACAAAATAGTTTGGAACTAGATTTCACTTATCTGGTTCGGATCTCC |
| | TAGGCGATATCAGTGATCACGGATCTCGACCAATTGACATTATTGAAGCA |
| | ACTAGTATCGATTTTATCAGGGTTATTGTCTCAGACCACTCCCTCTATGCG |
| | CGCTCGCTCACTCACTCGGCCCTGGAGACCAAAGGTCTCCAGACTGCCGG |
| | CCTCTGGCCGGCAGGGCCGAGTGAGTGAGCGAGCGCGCATAGAGGGAGT |
| | GGGTACCTCCATCATCTAGGTTTGCCAGATCTGATATCGGCGCGCCCCTG |
| | GGCGCGCCCGAGTCCAACACCCGTGGGAATCCCATGGGCACCATGGCCC |
| | CTCGCTCCAAAAATGCTTTCGCGTCGCGCAGACACTGCTCGGTAGTTTCG |
| | GGGATCAGCGTTTGAGTAAGAGCCCGCGTCTGAACCCTCCGCGCCGCCCC |
| | GGCCCCAGTGGAAAGACGCGCAGGCAAAACGCACCACGTGACGGAGCG |
| | TGACCGCGCGCCGAGCGCGCGCCAAGGTCGGGCAGGAAGAGGGCCTATT |
| | TCCCATGATTCCTTCATATTTGCATATACGATACAAGGCTGTTAGAGAGA |
| | TAATTAGAATTAATTTGACTGTAAACACAAAGATATTAGTACAAAATACG |
| | TGACGTAGAAAGTAATAATTTCTTGGGTAGTTTGCAGTTTTAAAATTATG |
| | TTTTAAAATGGACTATCATATGCTTACCGTAACTTGAAAGTATTTCGATTT |
| | CTTGGCTTTATATATCTTGTGGAAAGGACGAAACACCGCACTAGAGTAAC |
| | AGTCTGACGTTTAAGAGCTATGCTGGAAACAGCATAGCAAGTTTAAATA |
| | AGGCTAGTCCGTTATCAACTTGAAAAAGTGGCACCGAGTCGGTGCTTTTT |
| | TTGCGGCCGCGCTTCGGCGCGCCCATATTTGCATGTCGCTATGTGTTCTG |
| | GGAAATCACCATAAACGTGAAATGTCTTTGGATTTGGGAATCTTATAAGT |
| | TCTGTATGAGACCACGGTACACCGCACTAGAGTAACAGTCTGACGTTTAA |
| | GAGCTATGCTGGAAACAGCATAGCAAGTTTAAATAAGGCTAGTCCGTTA |
| | TCAACTTGAAAAAGTGGCACCGAGTCGGTGCTTTTTTTGCGGCCGCTGAC |
| | GGCGCGCCCTGCAGTATTTAGCATGCCCCACCCATCTGCAAGGCATTCTG |
| | GATAGTGTCAAAACAGCCGGAAATCAAGTCCGTTTATCTCAAACTTTAGC |
| | ATTTTGGGAATAAATGATATTTGCTATGCTGGTTAAATTAGATTTTAGTTA |
| | AATTTCCTGCTGAAGCTCTAGTACGATAAGTAACTTGACCTAAGTGTAAA |
| | GTTGAGATTTCCTTCAGGTTTATATAGCTTGTGCGCCGCCTGGGTACACC |
| | GCACTAGAGTAACAGTCTGACGTTTAAGAGCTATGCTGGAAACAGCATA |
| | GCAAGTTTAAATAAGGCTAGTCCGTTATCAACTTGAAAAAGTGGCACCG |
| | AGTCGGTGCTTTTTTTGCGGCCGCGCTGCGGCCGCCTCGAGTGATCAAAA |
| | AAACCAACACACGCTTCCAATGAAAATAAACGATCCTTTATTGCTAGCCT |
| | TTACTTGTACAGCTCGTCCATGCCGAGAGTGATCCCGGCGGCGGTCACGA |
| | ACTCCAGCAGGACCATGTGATCGCGCTTCTCGTTGGGGTCTTTGCTCAGG |
| | GCGGACTGGGTGCTCAGGTAGTGGTTGTCGGGCAGCAACACGGGGCCGT |
| | CGCCGATGGGGGTGTTCTGCTGGTAGTGGTCGGCGAGCTGCACGCTGCCG |
| | TCCTCGATGTTGTGGCGGATCTTGAAGTTCACCTTGATGCCGTTCTTCTGC |
| | TTGTCGGCCATGATATAGACGTTGTGGCTGTTGTAGTTGTACTCCAGCTT |
| | GTGCCCCAGGATGTTGCCGTCCTCCTTGAAGTCGATGCCCTTCAGCTCGA |
| | TGCGGTTCACCAGGGTGTCGCCCTCGAACTTCACCTCGGCGCGGGTCTTG |
| | TAGTTGCCGTCGTCCTTGAAGAAGATGGTGCGCTCCTGGACGTAGCCTTC |
| | GGGCATGGCGGACTTGAAGAAGTCGTGCTGCTTCATGTGGTCGGGGTAG |
| | CGGCTGAAGCACTGCACGCCGTAGGTCAGGGTGGTCACGAGGGTGGGCC |
| | AGGGCACGGGCAGCTTGCCGGTGGTGCAGATGAACTTCAGGGTCAGCTT |
| | GCCGTAGGTGGCATCGCCCTCGCCCTCGCCGGACACGCTGAACTTGTGGC |
| | CGTTTACGTCGCCGTCCAGCTCGACCAGGATGGGCACCACCCCGGTGAAC |
| | AGCTCCTCGCCCTTGCTCACCATGGTGGCGACCGGTGGATCCCGGGCCCG |
| | CGGGGTGGCTTTACCAACAGTACCCGGAATGCCAAGCTTACTTAGATCGC |
| | AGTCTCGACGCTGGCTGGCTCCTGAGTGTCTGTCTGTGCTGTGGAGGTGG |
| | TGGTAGAATGAGGGCAGCCCCTGTGCCCCTGGGTTATATAGAGGAGCCT |
| | ACAGGGTGTGACTAGCCAGGAGGGGCTGTCCCCAGGGAGGGGCCCCTGA |
| | GAGCAGATGAGCTTTCAGCTCGTTGCCCGGGCACCGTGCCCACCCCGGAC |
| | CCAGGCGTGCAGCTTGCCCAGCCCCATGGCCTTGTATGGGCTGCCCCAAG |
| | GGCTGACTTGCTCACTGGTTCCTAAACTAAGTGCTGAGTCTAGCTGGCGG |
| | GGGACAGCTGGCCCTTCGCCGGGAACATGGCATGCAGGGTTATTTTTAGA |
| | GGCAGCAGGTGTTGGGGGGGGGGGGGCAGCCACATGTCTGGGTTAATTA |
| | TAACCAGGCATCTCGGGTGTCCCCAGGCCTTGCCTCCTTACATGGGCACG |
| | TCGACGATATCAGATCTAGGAACCCCTAGTGATGGAGTTGGCCACTCCCT |
| | CTCTGCGCGCTCGCTCGCTCACTGAGGCCGCCCGGGCAAAGCCCGGGCGT |
| | CGGGCGACCTTTGGTCGCCCGGCCTCAGTGAGCGAGCGAGCGCGCAGAG |
| | AGGGAGTGGCATGCAAGCTGTAGCCAACCACTAGAACTATAGCTAGAGT |
| | CCTGGGCGAACAAACGATGCTCGCCTTCCAGAAAACCGAGGATGCGAAC |
| | CACTTCATCCGGGGTCAGCACCACCGGCAAGCGCCGCGACGGCCGAGGT |
| | CTTCCGATCTCCTGAAGCCAGGGCAGATCCGTGCACAGCACCTTGCCGTA |
| | GAAGAACAGCAAGGCCGCCAATGCCTGACGATGCGTGGAGACCGAAACC |
| | TTGCGCTCGTTCGCCAGCCAGGACAGAAATGCCTCGACTTCGCTGCTGCC |
| | CAAGGTTGCCGGGTGACGCACACCGTGGAAACGGATGAAGGCACGAACC |
| | CAGTTGACATAAGCCTGTTCGGTTCGTAAACTGTAATGCAAGTAGCGTAT |
| | GCGCTCACGCAACTGGTCCAGAACCTTGACCGAACGCAGCGGTGGTAAC |
| | GGCGCAGTGGCGGTTTTCATGGCTTGTTATGACTGTTTTTTTGTACAGTCT |
| | ATGCCTCGGGCATCCAAGCAGCAAGCGCGTTACGCCGTGGGTCGATGTTT |
| | GATGTTATGGAGCAGCAACGATGTTACGCAGCAGCAACGATGTTACGCA |
| | GCAGGGCAGTCGCCCTAAAACAAAGTTAGGTGGCTCAAGTATGGGCATC |
| | ATTCGCACATGTAGGCTCGGCCCTGACCAAGTCAAATCCATGCGGGCTGC |
| | TCTTGATCTTTTCGGTCGTGAGTTCGGAGACGTAGCCACCTACTCCCAAC |
| | ATCAGCCGGACTCCGATTACCTCGGGAACTTGCTCCGTAGTAAGACATTC |
| | ATCGCGCTTGCTGCCTTCGACCAAGAAGCGGTTGTTGGCGCTCTCGCGGC |
| | TTACGTTCTGCCCAAGTTTGAGCAGCCGCGTAGTGAGATCTATATCTATG |
| | ATCTCGCAGTCTCCGGCGAGCACCGGAGGCAGGGCATTGCCACCGCGCT |
| | CATCAATCTCCTCAAGCATGAGGCCAACGCGCTTGGTGCTTATGTGATCT |
| | ACGTGCAAGCAGATTACGGTGACGATCCCGCAGTGGCTCTCTATACAAA |
| | GTTGGGCATACGGGAAGAAGTGATGCACTTTGATATCGACCCAAGTACC |
| | GCCACCTAACAATTCGTTCAAGCCGAGATCGGCTTCCCGGCCGCGGAGTT |
| | GTTCGGTAAATTGTCACAACGCCGCGAATATAGTCTTTACCATGCCCTTG |
| | GCCACGCCCCTCTTTAATACGACGGGCAATTTGCACTTCAGAAAATGAAG |
| | AGTTTGCTTTAGCCATAACAAAAGTCCAGTATGCTTTTTCACAGCATAAC |
| | TGGACTGATTTCAGTTTACAACTATTCTGTCTAGTTTAAGACTTTATTGTC |
| | ATAGTTTAGATCTATTTTGTTCAGTTTAAGACTTTATTGTCCGCCCACACC |
| | CGCTTACGC |
| 921 | AAGATGACGGTTTGTCACATGGAGTTGGCAGGATGTTTGATTAAAAACAT |
| | AACAGGAAGAAAAATGCCCCGCTGTGGGCGGACAAAATAGTTGGGAACT |
| | GGGAGGGGTGGAAATGGAGTTTTTAAGGATTATTTAGGGAAGAGTGACA |
| | AAATAGATGGGAACTGGGTGTAGCGTCGTAAGCTAATACGAAAATTAAA |
| | AATGACAAAATAGTTTGGAACTAGATTTCACTTATCTGGTTCGGATCTCC |
| | TAGGCGATATCAGTGATCACGGATCTCGACCAATTGACATTATTGAAGCA |
| | ACTAGTATCGATTTTATCAGGGTTATTGTCTCAGACCACTCCCTCTATGCG |
| | CGCTCGCTCACTCACTCGGCCCTGGAGACCAAAGGTCTCCAGACTGCCGG |
| | CCTCTGGCCGGCAGGGCCGAGTGAGTGAGCGAGCGCGCATAGAGGGAGT |
| | GGGTACCTCCATCATCTAGGTTTGCCAGATCTGATATCGGCGCGCCCCTG |
| | GGCGCGCCCGAGTCCAACACCCGTGGGAATCCCATGGGCACCATGGCCC |
| | CTCGCTCCAAAAATGCTTTCGCGTCGCGCAGACACTGCTCGGTAGTTTCG |
| | GGGATCAGCGTTTGAGTAAGAGCCCGCGTCTGAACCCTCCGCGCCGCCCC |
| | GGCCCCAGTGGAAAGACGCGCAGGCAAAACGCACCACGTGACGGAGCG |
| | TGACCGCGCGCCGAGCGCGCGCCAAGGTCGGGCAGGAAGAGGGCCTATT |
| | TCCCATGATTCCTTCATATTTGCATATACGATACAAGGCTGTTAGAGAGA |
| | TAATTAGAATTAATTTGACTGTAAACACAAAGATATTAGTACAAAATACG |
| | TGACGTAGAAAGTAATAATTTCTTGGGTAGTTTGCAGTTTTAAAATTATG |
| | TTTTAAAATGGACTATCATATGCTTACCGTAACTTGAAAGTATTTCGATTT |
| | CTTGGCTTTATATATCTTGTGGAAAGGACGAAACACCGCACCAGAGTAAC |
| | AGTCTGACGTTTAAGAGCTATGCTGGAAACAGCATAGCAAGTTTAAATA |
| | AGGCTAGTCCGTTATCAACTTGAAAAAGTGGCACCGAGTCGGTGCTTTTT |
| | TTGCGGCCGCGCTCGGCGCGCCCATATTTGCATGTCGCTATGTGTTCTGG |
| | GAAATCACCATAAACGTGAAATGTCTTTGGATTTGGGAATCTTATAAGTT |
| | CTGTATGAGACCACGGTACACCGCACCAGAGTAACAGTCTGACGTTTAA |
| | GAGCTATGCTGGAAACAGCATAGCAAGTTTAAATAAGGCTAGTCCGTTA |
| | TCAACTTGAAAAAGTGGCACCGAGTCGGTGCTTTTTTTGCGGCCGCTGAC |
| | GGCGCGCCCTGCAGTATTTAGCATGCCCCACCCATCTGCAAGGCATTCTG |
| | GATAGTGTCAAAACAGCCGGAAATCAAGTCCGTTTATCTCAAACTTTAGC |
| | ATTTTGGGAATAAATGATATTTGCTATGCTGGTTAAATTAGATTTTAGTTA |
| | AATTTCCTGCTGAAGCTCTAGTACGATAAGTAACTTGACCTAAGTGTAAA |
| | GTTGAGATTTCCTTCAGGTTTATATAGCTTGTGCGCCGCCTGGGTACACC |
| | GCACCAGAGTAACAGTCTGACGTTTAAGAGCTATGCTGGAAACAGCATA |
| | GCAAGTTTAAATAAGGCTAGTCCGTTATCAACTTGAAAAAGTGGCACCG |
| | AGTCGGTGCTTTTTTTGCGGCCGCGCTGTTTAAACCAACAAAATCAGCAG |
| | CTAATGAAGGCAAGTCAGCAGGTCACTCATCATTTTCCACTTCGGCAATG |
| | CAGTGGGATTATTCCAACAGAGGTTTTTCACAGCATTCCTTCAGTTAACT |
| | GGAGATCGAATCTTGATTTTCACAGATATACTTGGCAAGGTCCGCCCTGT |
| | CATCAGCACATTCAAGCAGATCTCCATGGCAGCATTCCGTGTGGACTTAG |
| | GTAAGATCTGTCACTAACTTGGAAACTTCTGCAAACTCAGCTTAGGGAAA |
| | TCTCTGGCTCAGGCGAGCTACTGCCTCAGCTTAGAAAGCTCTTTCTCCAA |
| | ATTATTGGAGACTGGCACACTTAAGTCCCTGTTAGGCAGACGAAGCCTTC |
| | CCTTCATCCCGAAGTTCATCGAGCTTTGGCAACAGGCAGGCAGCTTTATC |
| | AGCAGCTTGGCAACATTCTGTAAAAGCAGCTTTATACCTTTAAGCAAAGA |
| | AAAGGAGTTCCGGGGCATAAAAGTAAGGATGTCTTCTGGCAATTTATAA |
| | TAAGTATTTTTTCAAAAATGTCTCTTCATTGTCATGAAAAGCAGTGCATC |
| | ACACATCAACCTCTGGTCTCACCAATCGGGGGAGGTTTGGGTTGTTTACT |
| | TAGTGTTGCAAGAATTATTTTATTCTCTCAGGTTCTTGTTTTGCACAGCAG |
| | TCAGCTCATTCACCATAGGTTTCACGAAGAGTTGCTGCGGCCGCCTCGAT |
| | AATACGACTCACTATAGGGTCGACGATATCAGATCTAGGAACCCCTAGT |
| | GATGGAGTTGGCCACTCCCTCTCTGCGCGCTCGCTCGCTCACTGAGGCCG |
| | CCCGGGCAAAGCCCGGGCGTCGGGCGACCTTTGGTCGCCCGGCCTCAGT |
| | GAGCGAGCGAGCGCGCAGAGAGGGAGTGGCATGCAAGCTGTAGCCAAC |
| | CACTAGAACTATAGCTAGAGTCCTGGGCGAACAAACGATGCTCGCCTTCC |
| | AGAAAACCGAGGATGCGAACCACTTCATCCGGGGTCAGCACCACCGGCA |
| | AGCGCCGCGACGGCCGAGGTCTTCCGATCTCCTGAAGCCAGGGCAGATC |
| | CGTGCACAGCACCTTGCCGTAGAAGAACAGCAAGGCCGCCAATGCCTGA |
| | CGATGCGTGGAGACCGAAACCTTGCGCTCGTTCGCCAGCCAGGACAGAA |
| | ATGCCTCGACTTCGCTGCTGCCCAAGGTTGCCGGGTGACGCACACCGTGG |
| | AAACGGATGAAGGCACGAACCCAGTTGACATAAGCCTGTTCGGTTCGTA |
| | AACTGTAATGCAAGTAGCGTATGCGCTCACGCAACTGGTCCAGAACCTTG |
| | ACCGAACGCAGCGGTGGTAACGGCGCAGTGGCGGTTTTCATGGCTTGTTA |
| | TGACTGTTTTTTTGTACAGTCTATGCCTCGGGCATCCAAGCAGCAAGCGC |
| | GTTACGCCGTGGGTCGATGTTTGATGTTATGGAGCAGCAACGATGTTACG |
| | CAGCAGCAACGATGTTACGCAGCAGGGCAGTCGCCCTAAAACAAAGTTA |
| | GGTGGCTCAAGTATGGGCATCATTCGCACATGTAGGCTCGGCCCTGACCA |
| | AGTCAAATCCATGCGGGCTGCTCTTGATCTTTTCGGTCGTGAGTTCGGAG |
| | ACGTAGCCACCTACTCCCAACATCAGCCGGACTCCGATTACCTCGGGAAC |
| | TTGCTCCGTAGTAAGACATTCATCGCGCTTGCTGCCTTCGACCAAGAAGC |
| | GGTTGTTGGCGCTCTCGCGGCTTACGTTCTGCCCAAGTTTGAGCAGCCGC |
| | GTAGTGAGATCTATATCTATGATCTCGCAGTCTCCGGCGAGCACCGGAGG |
| | CAGGGCATTGCCACCGCGCTCATCAATCTCCTCAAGCATGAGGCCAACGC |
| | GCTTGGTGCTTATGTGATCTACGTGCAAGCAGATTACGGTGACGATCCCG |
| | CAGTGGCTCTCTATACAAAGTTGGGCATACGGGAAGAAGTGATGCACTTT |
| | GATATCGACCCAAGTACCGCCACCTAACAATTCGTTCAAGCCGAGATCG |
| | GCTTCCCGGCCGCGGAGTTGTTCGGTAAATTGTCACAACGCCGCGAATAT |
| | AGTCTTTACCATGCCCTTGGCCACGCCCCTCTTTAATACGACGGGCAATT |
| | TGCACTTCAGAAAATGAAGAGTTTGCTTTAGCCATAACAAAAGTCCAGTA |
| | TGCTTTTTCACAGCATAACTGGACTGATTTCAGTTTACAACTATTCTGTCT |
| | AGTTTAAGACTTTATTGTCATAGTTTAGATCTATTTTGTTCAGTTTAAGAC |
| | TTTATTGTCCGCCCACACCCGCTTACGC |
| 917 | AAGATGACGGTTTGTCACATGGAGTTGGCAGGATGTTTGATTAAAAACAT |
| | AACAGGAAGAAAAATGCCCCGCTGTGGGCGGACAAAATAGTTGGGAACT |
| | GGGAGGGGTGGAAATGGAGTTTTTAAGGATTATTTAGGGAAGAGTGACA |
| | AAATAGATGGGAACTGGGTGTAGCGTCGTAAGCTAATACGAAAATTAAA |
| | AATGACAAAATAGTTTGGAACTAGATTTCACTTATCTGGTTCGGATCTCC |
| | TAGGCGATATCAGTGATCACGGATCTCGACCAATTGACATTATTGAAGCA |
| | ACTAGTATCGATTTTATCAGGGTTATTGTCTCAGACCACTCCCTCTATGCG |
| | CGCTCGCTCACTCACTCGGCCCTGGAGACCAAAGGTCTCCAGACTGCCGG |
| | CCTCTGGCCGGCAGGGCCGAGTGAGTGAGCGAGCGCGCATAGAGGGAGT |
| | GGGTACCTCCATCATCTAGGTTTGCCAGATCTGATATCGGCGCGCCCCTG |
| | GGCGCGCCCGAGTCCAACACCCGTGGGAATCCCATGGGCACCATGGCCC |
| | CTCGCTCCAAAAATGCTTTCGCGTCGCGCAGACACTGCTCGGTAGTTTCG |
| | GGGATCAGCGTTTGAGTAAGAGCCCGCGTCTGAACCCTCCGCGCCGCCCC |
| | GGCCCCAGTGGAAAGACGCGCAGGCAAAACGCACCACGTGACGGAGCG |
| | TGACCGCGCGCCGAGCGCGCGCCAAGGTCGGGCAGGAAGAGGGCCTATT |
| | TCCCATGATTCCTTCATATTTGCATATACGATACAAGGCTGTTAGAGAGA |
| | TAATTAGAATTAATTTGACTGTAAACACAAAGATATTAGTACAAAATACG |
| | TGACGTAGAAAGTAATAATTTCTTGGGTAGTTTGCAGTTTTAAAATTATG |
| | TTTTAAAATGGACTATCATATGCTTACCGTAACTTGAAAGTATTTCGATTT |
| | CTTGGCTTTATATATCTTGTGGAAAGGACGAAACACCGCACCAGAGTAAC |
| | AGTCTGAGGTTTAAGAGCTATGCTGGAAACAGCATAGCAAGTTTAAATA |
| | AGGCTAGTCCGTTATCAACTTGAAAAAGTGGCACCGAGTCGGTGCTTTTT |
| | TTGCGGCCGCGCTCGGCGCGCCCATATTTGCATGTCGCTATGTGTTCTGG |
| | GAAATCACCATAAACGTGAAATGTCTTTGGATTTGGGAATCTTATAAGTT |
| | CTGTATGAGACCACGGTACACCGCACCAGAGTAACAGTCTGAGGTTTAA |
| | GAGCTATGCTGGAAACAGCATAGCAAGTTTAAATAAGGCTAGTCCGTTA |
| | TCAACTTGAAAAAGTGGCACCGAGTCGGTGCTTTTTTTGCGGCCGCTGAC |
| | GGCGCGCCCTGCAGTATTTAGCATGCCCCACCCATCTGCAAGGCATTCTG |
| | GATAGTGTCAAAACAGCCGGAAATCAAGTCCGTTTATCTCAAACTTTAGC |
| | ATTTTGGGAATAAATGATATTTGCTATGCTGGTTAAATTAGATTTTAGTTA |
| | AATTTCCTGCTGAAGCTCTAGTACGATAAGTAACTTGACCTAAGTGTAAA |
| | GTTGAGATTTCCTTCAGGTTTATATAGCTTGTGCGCCGCCTGGGTACACC |
| | GCACCAGAGTAACAGTCTGAGGTTTAAGAGCTATGCTGGAAACAGCATA |
| | GCAAGTTTAAATAAGGCTAGTCCGTTATCAACTTGAAAAAGTGGCACCG |
| | AGTCGGTGCTTTTTTTGCGGCCGCGCTGTTTAAACCAACAAAATCAGCAG |
| | CTAATGAAGGCAAGTCAGCAGGTCACTCATCATTTTCCACTTCGGCAATG |
| | CAGTGGGATTATTCCAACAGAGGTTTTTCACAGCATTCCTTCAGTTAACT |
| | GGAGATCGAATCTTGATTTTCACAGATATACTTGGCAAGGTCCGCCCTGT |
| | CATCAGCACATTCAAGCAGATCTCCATGGCAGCATTCCGTGTGGACTTAG |
| | GTAAGATCTGTCACTAACTTGGAAACTTCTGCAAACTCAGCTTAGGGAAA |
| | TCTCTGGCTCAGGCGAGCTACTGCCTCAGCTTAGAAAGCTCTTTCTCCAA |
| | ATTATTGGAGACTGGCACACTTAAGTCCCTGTTAGGCAGACGAAGCCTTC |
| | CCTTCATCCCGAAGTTCATCGAGCTTTGGCAACAGGCAGGCAGCTTTATC |
| | AGCAGCTTGGCAACATTCTGTAAAAGCAGCTTTATACCTTTAAGCAAAGA |
| | AAAGGAGTTCCGGGGCATAAAAGTAAGGATGTCTTCTGGCAATTTATAA |
| | TAAGTATTTTTTCAAAAATGTCTCTTCATTGTCATGAAAAGCAGTGCATC |
| | ACACATCAACCTCTGGTCTCACCAATCGGGGGAGGTTTGGGTTGTTTACT |
| | TAGTGTTGCAAGAATTATTTTATTCTCTCAGGTTCTTGTTTTGCACAGCAG |
| | TCAGCTCATTCACCATAGGTTTCACGAAGAGTTGCTGCGGCCGCCTCGAT |
| | AATACGACTCACTATAGGGTCGACGATATCAGATCTAGGAACCCCTAGT |
| | GATGGAGTTGGCCACTCCCTCTCTGCGCGCTCGCTCGCTCACTGAGGCCG |
| | CCCGGGCAAAGCCCGGGCGTCGGGCGACCTTTGGTCGCCCGGCCTCAGT |
| | GAGCGAGCGAGCGCGCAGAGAGGGAGTGGCATGCAAGCTGTAGCCAAC |
| | CACTAGAACTATAGCTAGAGTCCTGGGCGAACAAACGATGCTCGCCTTCC |
| | AGAAAACCGAGGATGCGAACCACTTCATCCGGGGTCAGCACCACCGGCA |
| | AGCGCCGCGACGGCCGAGGTCTTCCGATCTCCTGAAGCCAGGGCAGATC |
| | CGTGCACAGCACCTTGCCGTAGAAGAACAGCAAGGCCGCCAATGCCTGA |
| | CGATGCGTGGAGACCGAAACCTTGCGCTCGTTCGCCAGCCAGGACAGAA |
| | ATGCCTCGACTTCGCTGCTGCCCAAGGTTGCCGGGTGACGCACACCGTGG |
| | AAACGGATGAAGGCACGAACCCAGTTGACATAAGCCTGTTCGGTTCGTA |
| | AACTGTAATGCAAGTAGCGTATGCGCTCACGCAACTGGTCCAGAACCTTG |
| | ACCGAACGCAGCGGTGGTAACGGCGCAGTGGCGGTTTTCATGGCTTGTTA |
| | TGACTGTTTTTTTGTACAGTCTATGCCTCGGGCATCCAAGCAGCAAGCGC |
| | GTTACGCCGTGGGTCGATGTTTGATGTTATGGAGCAGCAACGATGTTACG |
| | CAGCAGCAACGATGTTACGCAGCAGGGCAGTCGCCCTAAAACAAAGTTA |
| | GGTGGCTCAAGTATGGGCATCATTCGCACATGTAGGCTCGGCCCTGACCA |
| | AGTCAAATCCATGCGGGCTGCTCTTGATCTTTTCGGTCGTGAGTTCGGAG |
| | ACGTAGCCACCTACTCCCAACATCAGCCGGACTCCGATTACCTCGGGAAC |
| | TTGCTCCGTAGTAAGACATTCATCGCGCTTGCTGCCTTCGACCAAGAAGC |
| | GGTTGTTGGCGCTCTCGCGGCTTACGTTCTGCCCAAGTTTGAGCAGCCGC |
| | GTAGTGAGATCTATATCTATGATCTCGCAGTCTCCGGCGAGCACCGGAGG |
| | CAGGGCATTGCCACCGCGCTCATCAATCTCCTCAAGCATGAGGCCAACGC |
| | GCTTGGTGCTTATGTGATCTACGTGCAAGCAGATTACGGTGACGATCCCG |
| | CAGTGGCTCTCTATACAAAGTTGGGCATACGGGAAGAAGTGATGCACTTT |
| | GATATCGACCCAAGTACCGCCACCTAACAATTCGTTCAAGCCGAGATCG |
| | GCTTCCCGGCCGCGGAGTTGTTCGGTAAATTGTCACAACGCCGCGAATAT |
| | AGTCTTTACCATGCCCTTGGCCACGCCCCTCTTTAATACGACGGGCAATT |
| | TGCACTTCAGAAAATGAAGAGTTTGCTTTAGCCATAACAAAAGTCCAGTA |
| | TGCTTTTTCACAGCATAACTGGACTGATTTCAGTTTACAACTATTCTGTCT |
| | AGTTTAAGACTTTATTGTCATAGTTTAGATCTATTTTGTTCAGTTTAAGAC |
| | TTTATTGTCCGCCCACACCCGCTTACGC |

[0338] In some embodiments of the gene editing constructs of the disclosure, including those embodiments encompassing SEQ ID NOs: 910 to 921, the construct comprises or consists of a first promoter, a first sequence encoding a gRNA, a second promoter, and a second sequence encoding a gRNA, a third promoter, and a third sequence encoding a gRNA. Exemplary sequences encoding gRNAs of the disclosure are SEQ ID NO. 383-705, 709-711, 715-717, 790-862, 864. In some embodiments, the sequence encoding the gRNA is CACTAGAGTAACAGTCTGAC (SEQ ID NO. 708). In some embodiments, the sequence encoding the gRNA is CACCAGAGTAACAGTCTGAG (SEQ ID NO. 714). In some embodiments, the sequence encoding the gRNA is CACCAGAGTAACAGTCTGAC (SEQ ID NO. 863). In some embodiments, the construct comprises, from 5′ to 3′, a first promoter, the sequence encoding a gRNA of SEQ ID NO. 708, a second promoter, a second sequence encoding a gRNA of SEQ ID NO. 708, a third promoter, and a third sequence encoding a gRNA of SEQ ID NO. 708. In some embodiments, the construct comprises, from 5′ to 3′, a first promoter, the sequence encoding a gRNA of SEQ ID NO. 714, a second promoter, a second sequence encoding a gRNA of SEQ ID NO. 714, a third promoter, and a third sequence encoding a gRNA of SEQ ID NO. 714. In some embodiments, the construct comprises, from 5′ to 3′, a first promoter, the sequence encoding a gRNA of SEQ ID NO. 863, a second promoter, a second sequence encoding a gRNA of SEQ ID NO. 863, a third promoter, and a third sequence encoding a gRNA of SEQ ID NO. 863. Exemplary promoters of the disclosure include the U6 promoter having a sequence of CGAGTCCAACACCCGTGGGAATCCCATGGGCACCATGGCCCCTCGCTCCAAAAA TGCTTTCGCGTCGCGCAGACACTGCTCGGTAGTTTCGGGGATCAGCGTTTGAGTA AGAGCCCGCGTCTGAACCCTCCGCGCCGCCCCGGCCCCAGTGGAAAGACGCGCA GGCAAAACGCACCACGTGACGGAGCGTGACCGCGCGCCGAGCGCGCGCCAAGGT CGGGCAGGAAGAGGGCCTATTTCCCATGATTCCTTCATATTTGCATATACGATAC AAGGCTGTTAGAGAGATAATTAGAATTAATTTGACTGTAAACACAAAGATATTA GTACAAAATACGTGACGTAGAAAGTAATAATTTCTTGGGTAGTTTGCAGTTTTAA AATTATGTTTTAAAATGGACTATCATATGCTTACCGTAACTTGAAAGTATTTCGAT TTCTTGGCTTTATATATCTTGTGGAAAGGACGAAA (SEQ ID NO: 922), the H1 promoter having a sequence of GCTCGGCGCGCCCATATTTGCATGTCGCTATGTGTTCTGGGAAATCACCATAAAC GTGAAATGTCTTTGGATTTGGGAATCTTATAAGTTCTGTATGAGACCACGGTA (SEQ ID. No923), and the 7SK promoter having a sequence of TGACGGCGCGCCCTGCAGTATTTAGCATGCCCCACCCATCTGCAAGGCATTCTGG ATAGTGTCAAAACAGCCGGAAATCAAGTCCGTTTATCTCAAACTTTAGCATTTTG GGAATAAATGATATTTGCTATGCTGGTTAAATTAGATTTTAGTTAAATTTCCTGCT GAAGCTCTAGTACGATAAGTAACTTGACCTAAGTGTAAAGTTGAGATTTCCTTCA GGTTTATATAGCTTGTGCGCCGCCTGGGTA (SEQ ID NO. 924). In some embodiments, the first, second, and third promoter are each individually selected from the U6 promoter (SEQ ID NO: 922), the H1 promoter (SEQ ID NO: 923), and the 7SK promoter (SEQ ID NO: 924). In some embodiments, the first, second, and third promoter are each individually selected from the U6 promoter (SEQ ID NO: 922), and the H1 promoter (SEQ ID NO: 923).

[0339] In some embodiments, the construct comprises, from 5′ to 3′, a U6 promoter, a first sequence encoding a gRNA, a H1 promoter, a second sequence encoding a gRNA, a 7SK promoter, and a third sequence encoding a gRNA. In some embodiments, the construct comprises, from 5′ to 3′, the U6 promoter, the sequence encoding a gRNA of SEQ ID NO: 708, the H1 promoter, a second sequence encoding a gRNA of SEQ ID NO: 708, the 7SK promoter, and a third sequence encoding a gRNA of SEQ ID NO: 708. In some embodiments, the construct comprises, from 5′ to 3′, the U6 promoter, the sequence encoding a gRNA of SEQ ID NO: 714, the H1 promoter, a second sequence encoding a gRNA of SEQ ID NO: 714, the 7SK promoter, and a third sequence encoding a gRNA of SEQ ID NO: 714. In some embodiments, the construct comprises, from 5′ to 3′, the U6 promoter, the sequence encoding a gRNA of SEQ ID NO: 863, the H1 promoter, a second sequence encoding a gRNA of SEQ ID NO: 863, the 7SK promoter, and a third sequence encoding a gRNA of SEQ ID NO: 863. In some embodiments, the construct comprising a first promoter, a first sequence encoding a gRNA, a second promoter, and a second sequence encoding a gRNA, a third promoter, and a third sequence encoding a gRNA further comprises at least two inverted terminal repeat (ITR) sequences. In some embodiments, the construct comprising a first promoter, a first sequence encoding a gRNA, a second promoter, and a second sequence encoding a gRNA, a third promoter, and a third sequence encoding a gRNA further comprises at least two ITR sequences isolated or derived from an AAV of serotype 2 (AAV2). In some embodiments, the construct comprising a first promoter, a first sequence encoding a gRNA, a second promoter, and a second sequence encoding a gRNA, a third promoter, and a third sequence encoding a gRNA further comprises at least two ITR sequences, wherein the first ITR sequence is isolated or derived from an AAV of serotype 4 (AAV4) and the second ITR sequence is isolated or derived from an AAV of serotype 2 (AAV2). Exemplary ITR sequences are CCTGCAGGCAGCTGCGCGCTCGCTCGCTCACTGAGGCCGCCCGGGCAAAGCCCG GGCGTCGGGCGACCTTTGGTCGCCCGGCCTCAGTGAGCGAGCGAGCGCGCAGAG AGGGAGTGGCCAACTCCATCACTAGGGGTTCCT (SEQ ID NO: 881), CCACTCCCTCTATGCGCGCTCGCTCACTCACTCGGCCCTGGAGACCAAAGGTCTC CAGACTGCCGGCCTCTGGCCGGCAGGGCCGAGTGAGTGAGCGAGCGCGCATAGA GGGAGTGGGTACCTCCATCATCTAGGTTTGCC (SEQ ID NO. 883), AGGAACCCCTAGTGATGGAGTTGGCCACTCCCTCTCTGCGCGCTCGCTCGCTCAC TGAGGCCGCCCGGGCAAAGCCCGGGCGTCGGGCGACCTTTGGTCGCCCGGCCTC AGTGAGCGAGCGAGCGCGCAGAGAGGGAGTGG (SEQ ID NO. 946), and

[0340] AGGAACCCCTAGTGATGGAGTTGGCCACTCCCTCTCTGCGCGCTCGCTCGCTCAC TGAGGCCGGGCGACCAAAGGTCGCCCGACGCCCGGGCTTTGCCCGGGCGGCCTC AGTGAGCGAGCGAGCGCGCAGCTGCCTGCAGG (SEQ ID 882). In some embodiments, the construct comprises or consists of, from 5′ to 3′, a first ITR, a first promoter, a first sequence encoding a gRNA, a second promoter, and a second sequence encoding a gRNA, a third promoter, a third sequence encoding a gRNA, and a second ITR. In some embodiments, the construct comprises or consists of, from 5′ to 3′, a first ITR, a U6 promoter, a first sequence encoding a gRNA, a H1 promoter, and a second sequence encoding a gRNA, a 7SK promoter, a third sequence encoding a gRNA, and a second ITR. In some embodiments, the construct comprises or consists of, from 5′ to 3′, a first ITR, a first promoter, the sequence encoding a gRNA of SEQ ID NO: 708, a second promoter, and the sequence encoding a gRNA of SEQ ID NO: 708, a third promoter, the sequence encoding a gRNA of SEQ ID NO: 708, and a second ITR. In some embodiments, the construct comprises or consists of, from 5′ to 3′, a first ITR, a first promoter, the sequence encoding a gRNA of SEQ ID NO: 714, a second promoter, and the sequence encoding a gRNA of SEQ ID NO: 714, a third promoter, the sequence encoding a gRNA of SEQ ID NO: 714, and a second ITR. In some embodiments, the construct comprises or consists of, from 5′ to 3′, a first ITR, a first promoter, the sequence encoding a gRNA of SEQ ID NO: 863, a second promoter, and the sequence encoding a gRNA of SEQ ID NO: 863, a third promoter, the sequence encoding a gRNA of SEQ ID NO.: 863, and a second ITR. In some embodiments, the construct comprises or consists of, from 5′ to 3′, a first ITR, a U6, the sequence encoding a gRNA of SEQ ID NO: 708, a H1 promoter, and the sequence encoding a gRNA of SEQ ID NO: 708, a 7SK promoter, the sequence encoding a gRNA of SEQ ID NO: 708, and a second ITR. In some embodiments, the construct comprises or consists of, from 5′ to 3′, a first ITR, a U6, the sequence encoding a gRNA of SEQ ID NO: 714, a H1 promoter, and the sequence encoding a gRNA of SEQ ID NO: 714, a 7SK promoter, the sequence encoding a gRNA of SEQ ID NO: 714, and a second ITR. In some embodiments, the construct comprising, from 5′ to 3′ a first ITR, a first promoter, a first sequence encoding a gRNA, a second promoter, and a second sequence encoding a gRNA, a third promoter, a third sequence encoding a gRNA, and a second ITR, further comprises a poly A sequence. In some embodiments, the polyA sequence comprises or consists of a minipolyA sequence. Exemplary minipolyA sequences of the disclosure comprise or consist of a nucleotide sequence of TAGCAATAAAGGATCGTTTATTTTCATTGGAAGCGTGTGTTGGTTTTTTGATCAGG CGCG (SEQ ID NO: 903). In some embodiments, the construct comprises or consists of, from 5′ to 3′, a first ITR, a first promoter, a first sequence encoding a gRNA, a second promoter, and a second sequence encoding s gRNA, a third promoter, a third sequence encoding a gRNA, a minipolyA sequence, and a second ITR. In some embodiments, the construct comprises or consists of, from 5′ to 3′ a first ITR, the U6 promoter, a first sequence encoding a gRNA, the H1 promoter, a second sequence encoding a gRNA, the 7SK promoter, a third sequence encoding a gRNA, a minipolyA sequence, and a second ITR. In some embodiments, the construct comprises or consists of, from 5′ to 3′ a first ITR, a first promoter, the sequence encoding a gRNA of SEQ ID NO: 708, a second promoter, the sequence encoding a gRNA of SEQ ID NO: 708, a third promoter, the sequence encoding a gRNA of SEQ ID NO: 708, a minipolyA sequence, and a second ITR. In some embodiments, the construct comprises or consists of, from 5′ to 3′ a first ITR, a first promoter, the sequence encoding a gRNA of SEQ ID NO: 714, a second promoter, the sequence encoding a gRNA of SEQ ID NO. 714, a third promoter, the sequence encoding a gRNA of SEQ ID NO: 714, a minipolyA sequence, and a second ITR. In some embodiments, the construct comprises or consists of, from 5′ to 3′ a first ITR, a first promoter, the sequence encoding a gRNA of SEQ ID NO: 863, a second promoter, the sequence encoding a gRNA of SEQ ID NO: 863, a third promoter, the sequence encoding a gRNA of SEQ ID NO: 863, a minipolyA sequence, and a second ITR. In some embodiments, the construct comprises or consists of, from 5′ to 3′ a first ITR, the U6 promoter, the sequence encoding a gRNA of SEQ ID NO: 708, the H1 promoter, the sequence encoding a gRNA of SEQ ID NO: 708, the 7SK promoter, the sequence encoding a gRNA of SEQ ID NO: 708, a minipolyA sequence, and a second ITR. In some embodiments, the construct comprises or consists of, from 5′ to 3′ a first ITR, the U6 promoter, the sequence encoding a gRNA of SEQ ID NO: 714, the H1 promoter, the sequence encoding a gRNA of SEQ ID NO: 714, the 7SK promoter, the sequence encoding a gRNA of SEQ ID NO: 714, a minipolyA sequence, and a second ITR. In some embodiments, the construct comprising, from 5′ to 3′ a first ITR, a first promoter, a first sequence encoding a gRNA, a second promoter, and a second sequence encoding a gRNA, a third promoter, a third sequence encoding a gRNA, a minipolyA sequence, and a second ITR further comprises transposable element inverted repeats. Exemplary transposable element inverted repeats of the disclosure comprise or consist of a nucleotide sequence of TGTGGGCGGACAAAATAGTTGGGAACTGGGAGGGGTGGAAATGGAGTTTTTAAG GATTATTTAGGGAAGAGTGACAAAATAGATGGGAACTGGGTGTAGCGTCGTAAG CTAATACGAAAATTAAAAATGACAAAATAGTTTGGAACTAGATTTCACTTATCTG GTT (SEQ ID NO: 907) and/or a nucleotide sequence of GAATATAGTCTTTACCATGCCCTTGGCCACGCCCCTCTTTAATACGACGGGCAAT TTGCACTTCAGAAAATGAAGAGTTTGCTTTAGCCATAACAAAAGTCCAGTATGCT TTTTCACAGCATAACTGGACTGATTTCAGTTTACAACTATTCTGTCTAGTTTAAGA CTTTATTGTCATAGTTTAGATCTATTTTGTTCAGTTTAAGACTTTATTGTCCGCCCA CA (SEQ ID NO: 908). In some embodiments, the construct comprises or consists of, from 5′ to 3′, a first transposable element inverted repeat, a first ITR, a first promoter, a first sequence encoding a gRNA, a second promoter, a second sequence encoding a gRNA, a third promoter, a third sequence encoding a gRNA, a minipolyA sequence, a second ITR, and a second transposable element inverted repeat. In some embodiments, the construct comprises or consists of, from 5′ to 3′, a first transposable element inverted repeat, a first ITR, the U6 promoter, a first sequence encoding a gRNA, the H1 promoter, a second sequence encoding a gRNA, the 7SK promoter, a third sequence encoding a gRNA, a minipolyA sequence, a second ITR, and a second transposable element inverted repeat. In some embodiments, the construct comprises or consists of, from 5′ to 3′, a first transposable element inverted repeat, a first ITR, a first promoter, the sequence encoding a gRNA of SEQ ID NO: 708, a second promoter, the sequence encoding a gRNA of SEQ ID NO: 708, a third promoter, the sequence encoding a gRNA of SEQ ID NO: 708, a minipolyA sequence, a second ITR, and a second transposable element inverted repeat. In some embodiments, the construct comprises or consists of, from 5′ to 3′, a first transposable element inverted repeat, a first ITR, a first promoter, the sequence encoding a gRNA of SEQ ID NO: 714, a second promoter, the sequence encoding a gRNA of SEQ ID NO: 714, a third promoter, the sequence encoding a gRNA of SEQ ID NO: 714, a minipolyA sequence, a second ITR, and a second transposable element inverted repeat. In some embodiments, the construct comprises or consists of, from 5′ to 3′, a first transposable element inverted repeat, a first ITR, a first promoter, the sequence encoding a gRNA of SEQ ID NO: 863, a second promoter, the sequence encoding a gRNA of SEQ ID NO: 863, a third promoter, the sequence encoding a gRNA of SEQ ID NO: 863, a minipolyA sequence, a second ITR, and a second transposable element inverted repeat. In some embodiments, the construct comprises or consists of, from 5′ to 3′, a first transposable element inverted repeat, a first ITR, the U6 promoter, the sequence encoding a gRNA of SEQ ID NO: 708, the H1 promoter, the sequence encoding a gRNA of SEQ ID NO: 708, the 7SK promoter, the sequence encoding a gRNA of SEQ ID NO: 708, a minipolyA sequence, a second ITR, and a second transposable element inverted repeat. In some embodiments, the construct comprises or consists of, from 5′ to 3′, a first transposable element inverted repeat, a first ITR, the U6 promoter, the sequence encoding a gRNA of SEQ ID NO: 714, the H1 promoter, the sequence encoding a gRNA of SEQ ID NO: 714, the 7SK promoter, the sequence encoding a gRNA of SEQ ID NO: 714, a minipolyA sequence, a second ITR, and a second transposable element inverted repeat. In some embodiments, the construct comprising a first transposable element inverted repeat, a first ITR, a first promoter, a first sequence encoding a gRNA, a second promoter, a second sequence encoding a gRNA, a third promoter, a third sequence encoding a gRNA, a minipolyA sequence, a second ITR, a second transposable element inverted repeat, further comprises a regulatory sequence. Exemplary regulatory sequences of the disclosure comprise or consist of a nucleotide sequence of CATGCAAGCTGTAGCCAACCACTAGAACTATAGCTAGAGTCCTGGGCGAACAAA CGATGCTCGCCTTCCAGAAAACCGAGGATGCGAACCACTTCATCCGGGGTCAGC ACCACCGGCAAGCGCCGCGACGGCCGAGGTCTTCCGATCTCCTGAAGCCAGGGC AGATCCGTGCACAGCACCTTGCCGTAGAAGAACAGCAAGGCCGCCAATGCCTGA CGATGCGTGGAGACCGAAACCTTGCGCTCGTTCGCCAGCCAGGACAGAAATGCC TCGACTTCGCTGCTGCCCAAGGTTGCCGGGTGACGCACACCGTGGAAACGGATG AAGGCACGAACCCAGTTGACATAAGCCTGTTCGGTTCGTAAACTGTAATGCAAGT AGCGTATGCGCTCACGCAACTGGTCCAGAACCTTGACCGAACGCAGCGGTGGTA ACGGCGCAGTGGCGGTTTTCATGGCTTGTTATGACTGTTTTTTTGTACAGTCTATG CCTCGGGCATCCAAGCAGCAAGCGCGTTACGCCGTGGGTCGATGTTTGATGTTAT GGAGCAGCAACGATGTTACGCAGCAGCAACGATGTTACGCAGCAGGGCAGTCGC CCTAAAACAAAGTTAGGTGGCTCAAGTATGGGCATCATTCGCACATGTAGGCTCG GCCCTGACCAAGTCAAATCCATGCGGGCTGCTCTTGATCTTTTCGGTCGTGAGTT CGGAGACGTAGCCACCTACTCCCAACATCAGCCGGACTCCGATTACCTCGGGAA CTTGCTCCGTAGTAAGACATTCATCGCGCTTGCTGCCTTCGACCAAGAAGCGGTT GTTGGCGCTCTCGCGGCTTACGTTCTGCCCAAGTTTGAGCAGCCGCGTAGTGAGA TCTATATCTATGATCTCGCAGTCTCCGGCGAGCACCGGAGGCAGGGCATTGCCAC CGCGCTCATCAATCTCCTCAAGCATGAGGCCAACGCGCTTGGTGCTTATGTGATC TACGTGCAAGCAGATTACGGTGACGATCCCGCAGTGGCTCTCTATACAAAGTTGG GCATACGGGAAGAAGTGATGCACTTTGATATCGACCCAAGTACCGCCACCTAAC AATTCGTTCAAGCCGAGATCGGCTTCCCGGCCGCGGAGTTGTTCGGTAAATTGTC ACAACGCCG (SEQ ID NO: 909). In some embodiments, the construct comprises or consists of, from 5′ to 3′ a first transposable element inverted repeat, a first ITR, a first promoter, a first sequence encoding a gRNA, a second promoter, a second sequence encoding a gRNA, a third promoter, a third sequence encoding a gRNA, a minipolyA sequence, a second ITR, a regulatory sequence, and a second transposable element inverted repeat. In some embodiments, the construct comprises or consists of, from 5′ to 3′ a first transposable element inverted repeat, a first ITR, the U6 promoter, a first sequence encoding a gRNA, the H1 promoter, a second sequence encoding a gRNA, the 7SK promoter, a third sequence encoding a gRNA, a minipolyA sequence, a second ITR, a regulatory sequence, and a second transposable element inverted repeat. In some embodiments, the construct comprises or consists of, from 5′ to 3′ a first transposable element inverted repeat, a first ITR, a first promoter, the sequence encoding a gRNA of SEQ ID NO: 708, a second promoter, the sequence encoding a gRNA of SEQ ID NO: 708, a third promoter, the sequence encoding a gRNA of SEQ ID NO: 708, a minipolyA sequence, a second ITR, a regulatory sequence, and a second transposable element inverted repeat. In some embodiments, the construct comprises or consists of, from 5′ to 3′ a first transposable element inverted repeat, a first ITR, a first promoter, the sequence encoding a gRNA of SEQ ID NO: 714, a second promoter, the sequence encoding a gRNA of SEQ ID NO: 714, a third promoter, the sequence encoding a gRNA of SEQ ID NO: 714, a minipolyA sequence, a second ITR, a regulatory sequence, and a second transposable element inverted repeat. In some embodiments, the construct comprises or consists of, from 5′ to 3′ a first transposable element inverted repeat, a first ITR, a first promoter, the sequence encoding a gRNA of SEQ ID NO: 863, a second promoter, the sequence encoding a gRNA of SEQ ID NO: 863, a third promoter, the sequence encoding a gRNA of SEQ ID NO: 863, a minipolyA sequence, a second ITR, a regulatory sequence, and a second transposable element inverted repeat. In some embodiments, the construct comprises or consists of, from 5′ to 3′ a first transposable element inverted repeat, a first ITR, the U6 promoter, the sequence encoding a gRNA of SEQ ID NO: 708, the H1 promoter, the sequence encoding a gRNA of SEQ ID NO. 708, the 7SK promoter, the sequence encoding a gRNA of SEQ ID NO: 708, a minipolyA sequence, a second ITR, a regulatory sequence, and a second transposable element inverted repeat. In some embodiments, the construct comprises or consists of, from 5′ to 3′ a first transposable element inverted repeat, a first ITR, the U6 promoter, a sequence encoding a gRNA of SEQ ID NO: 714, the H1 promoter, a sequence encoding a gRNA of SEQ ID NO: 714, the 7SK promoter, a sequence encoding a gRNA of SEQ ID NO: 714, a minipolyA sequence, a second ITR, a regulatory sequence, and a second transposable element inverted repeat In some embodiments, the construct comprising a first ITR, a first promoter, a first sequence encoding a gRNA, a second promoter, and a second sequence encoding a gRNA, a third promoter, a third sequence encoding a gRNA, a minipolyA sequence, and a second ITR, further comprises a stuffer sequence. In some embodiments, the construct comprises or consists of, from 5′ to 3′ a first ITR, the U6 promoter, a first sequence encoding a gRNA, the H1 promoter, a second sequence encoding a gRNA, the 7SK promoter, a third sequence encoding a gRNA, a stuffer sequence, a minipolyA sequence, and a second ITR. In some embodiments, the construct comprises or consists of, from 5′ to 3′ a first ITR, a first promoter, the sequence encoding a gRNA of SEQ ID NO: 708, a second promoter, the sequence encoding a gRNA of SEQ ID NO: 708, a third promoter, the sequence encoding a gRNA of SEQ ID NO: 708, a stuffer sequence a minipolyA sequence, and a second ITR. In some embodiments, the construct comprises or consists of, from 5′ to 3′ a first ITR, a first promoter, the sequence encoding a gRNA of SEQ ID NO: 714, a second promoter, the sequence encoding a gRNA of SEQ ID NO: 714, a third promoter, the sequence encoding a gRNA of SEQ ID NO. 714, a stuffer sequence, a minipolyA sequence, and a second ITR. In some embodiments, the construct comprises or consists of, from 5′ to 3′ a first ITR, a first promoter, the sequence encoding a gRNA of SEQ ID NO: 863, a second promoter, the sequence encoding a gRNA of SEQ ID NO: 863, a third promoter, the sequence encoding a gRNA of SEQ ID NO: 863, a stuffer sequence, a minipolyA sequence, and a second ITR. In some embodiments, the construct comprises or consists of, from 5′ to 3′ a first ITR, the U6 promoter, the sequence encoding a gRNA of SEQ ID NO: 708, the H1 promoter, the sequence encoding a gRNA of

[0341] SEQ ID NO: 708, the 7SK promoter, the sequence encoding a gRNA of SEQ ID NO: 708, a stuffer sequence, a minipolyA sequence, and a second ITR. In some embodiments, the construct comprises or consists of, from 5′ to 3′ a first ITR, the U6 promoter, the sequence encoding a gRNA of SEQ ID NO: 714, the H1 promoter, the sequence encoding a gRNA of SEQ ID NO: 714, the 7SK promoter, the sequence encoding a gRNA of SEQ ID NO: 714, a stuffer sequence, a minipolyA sequence, and a second ITR In some embodiments, the construct comprises or consists of, from 5′ to 3′ a first transposable element inverted repeat, a first ITR, a first promoter, a first sequence encoding a gRNA, a second promoter, a second sequence encoding a gRNA, a third promoter, a third sequence encoding a gRNA, a stuffer sequence, a minipolyA sequence, a second ITR, a regulatory sequence, and a second transposable element inverted repeat. In some embodiments, the construct comprises or consists of, from 5′ to 3′ a first transposable element inverted repeat, a first ITR, the U6 promoter, a first sequence encoding a gRNA, the H1 promoter, a second sequence encoding a gRNA, the 7SK promoter, a third sequence encoding a gRNA, a stuffer sequence, a minipolyA sequence, a second ITR, a regulatory sequence, and a second transposable element inverted repeat. In some embodiments, the construct comprises or consists of, from 5′ to 3′ a first transposable element inverted repeat, a first ITR, a first promoter, the sequence encoding a gRNA of SEQ ID NO: 708, a second promoter, the sequence encoding a gRNA of SEQ ID NO: 708, a third promoter, the sequence encoding a gRNA of SEQ ID NO: 708, a stuffer sequence, a minipolyA sequence, a second ITR, a regulatory sequence, and a second transposable element inverted repeat. In some embodiments, the construct comprises or consists of, from 5′ to 3′ a first transposable element inverted repeat, a first ITR, a first promoter, the sequence encoding a gRNA of SEQ ID NO: 714, a second promoter, the sequence encoding a gRNA of SEQ ID NO: 714, a third promoter, the sequence encoding a gRNA of SEQ ID NO: 714, a stuffer sequence, a minipolyA sequence, a second ITR, a regulatory sequence, and a second transposable element inverted repeat. In some embodiments, the construct comprises or consists of, from 5′ to 3′ a first transposable element inverted repeat, a first ITR, a first promoter, the sequence encoding a gRNA of SEQ ID NO: 863, a second promoter, the sequence encoding a gRNA of SEQ ID NO: 863, a third promoter, the sequence encoding a gRNA of SEQ ID NO: 863, a stuffer sequence, a minipolyA sequence, a second ITR, a regulatory sequence, and a second transposable element inverted repeat. In some embodiments, the construct comprises or consists of, from 5′ to 3′ a first transposable element inverted repeat, a first ITR, the U6 promoter, the sequence encoding a gRNA of SEQ ID NO: 708, the H1 promoter, the sequence encoding a gRNA of SEQ ID NO: 708, the 7SK promoter, the sequence encoding a gRNA of SEQ ID NO: 708, a stuffer sequence, a minipolyA sequence, a second ITR, a regulatory sequence, and a second transposable element inverted repeat. In some embodiments, the construct comprises or consists of, from 5′ to 3′ a first transposable element inverted repeat, a first ITR, the U6 promoter, a sequence encoding a gRNA of SEQ ID NO: 714, the H1 promoter, a sequence encoding a gRNA of SEQ ID NO: 714, the 7SK promoter, a sequence encoding a gRNA of SEQ ID NO: 714, a stuffer sequence, a minipolyA sequence, a second ITR, a regulatory sequence, and a second transposable element inverted repeat. In some embodiments, the construct may further comprise one or more spacer sequences. Exemplary spacer sequences of the disclosure have length from 1-1500 nucleotides, inclusive of all ranges therebetween. In some embodiments, the spacer sequences may be located at a position that is 5′ to or 3′ to an ITR, a promoter, a sequence encoding a gRNA, a polyA sequence, a transposable element inverted repeat, a stuffer sequence, and/or a regulator element.

### V. PHARMACEUTICAL COMPOSITIONS AND DELIVERY METHODS

[0342] For clinical applications, pharmaceutical compositions are prepared in a form appropriate for the intended application. Generally, this entails preparing compositions that are essentially free of pyrogens, as well as other impurities that could be harmful to humans or animals.

[0343] Appropriate salts and buffers are used to render drugs, proteins or delivery vectors stable and allow for uptake by target cells. Aqueous compositions of the present disclosure comprise an effective amount of the drug, vector or proteins, dissolved or dispersed in a pharmaceutically acceptable carrier or aqueous medium. The phrase “pharmaceutically or pharmacologically acceptable” refer to molecular entities and compositions that do not produce adverse, allergic, or other untoward reactions when administered to an animal or a human. As used herein, “pharmaceutically acceptable carrier” includes solvents, buffers, solutions, dispersion media, coatings, antibacterial and antifungal agents, isotonic and absorption delaying agents and the like acceptable for use in formulating pharmaceuticals, such as pharmaceuticals suitable for administration to humans. The use of such media and agents for pharmaceutically active substances is well known in the art. Any conventional media or agent that is not incompatible with the active ingredients of the present disclosure, its use in therapeutic compositions may be used. Supplementary active ingredients also can be incorporated into the compositions, provided they do not inactivate the vectors or cells of the compositions.

[0344] In some embodiments, the active compositions of the present disclosure may include classic pharmaceutical preparations. Administration of these compositions according to the present disclosure may be via any common route so long as the target tissue is available via that route, but generally including systemic administration. This includes oral, nasal, or buccal. Alternatively, administration may be by intradermal, subcutaneous, intramuscular, intraperitoneal or intravenous injection, or by direct injection into muscle tissue. Such compositions would normally be administered as pharmaceutically acceptable compositions, as described supra.

[0345] The active compounds may also be administered parenterally or intraperitoneally. By way of illustration, solutions of the active compounds as free base or pharmacologically acceptable salts can be prepared in water suitably mixed with a surfactant, such as hydroxypropylcellulose. Dispersions can also be prepared in glycerol, liquid polyethylene glycols, and mixtures thereof and in oils. Under ordinary conditions of storage and use, these preparations generally contain a preservative to prevent the growth of microorganisms.

[0346] The pharmaceutical forms suitable for injectable use include, for example, sterile aqueous solutions or dispersions and sterile powders for the extemporaneous preparation of sterile injectable solutions or dispersions. Generally, these preparations are sterile and fluid to the extent that easy injectability exists. Preparations should be stable under the conditions of manufacture and storage and should be preserved against the contaminating action of microorganisms, such as bacteria and fungi. Appropriate solvents or dispersion media may contain, for example, water, ethanol, polyol (for example, glycerol, propylene glycol, and liquid polyethylene glycol, and the like), suitable mixtures thereof, and vegetable oils. The proper fluidity can be maintained, for example, by the use of a coating, such as lecithin, by the maintenance of the required particle size in the case of dispersion and by the use of surfactants. The prevention of the action of microorganisms can be brought about by various antibacterial and antifungal agents, for example, parabens, chlorobutanol, phenol, sorbic acid, thimerosal, and the like. In many cases, it will be preferable to include isotonic agents, for example, sugars or sodium chloride. Prolonged absorption of the injectable compositions can be brought about by the use in the compositions of agents delaying absorption, for example, aluminum monostearate and gelatin.

[0347] Sterile injectable solutions may be prepared by incorporating the active compounds in an appropriate amount into a solvent along with any other ingredients (for example as enumerated above) as desired, followed by filtered sterilization. Generally, dispersions are prepared by incorporating the various sterilized active ingredients into a sterile vehicle which contains the basic dispersion medium and the desired other ingredients, e.g., as enumerated above. In the case of sterile powders for the preparation of sterile injectable solutions, the preferred methods of preparation include vacuum-drying and freeze-drying techniques which yield a powder of the active ingredient(s) plus any additional desired ingredient from a previously sterile-filtered solution thereof.

[0348] In some embodiments, the compositions of the present disclosureare formulated in a neutral or salt form. Pharmaceutically-acceptable salts include, for example, acid addition salts (formed with the free amino groups of the protein) derived from inorganic acids (e.g., hydrochloric or phosphoric acids, or from organic acids (e.g., acetic, oxalic, tartaric, mandelic, and the like. Salts formed with the free carboxyl groups of the protein can also be derived from inorganic bases (e.g., sodium, potassium, ammonium, calcium, or ferric hydroxides) or from organic bases (e.g., isopropylamine, trimethylamine, histidine, procaine) and the like.

[0349] Upon formulation, solutions are preferably administered in a manner compatible with the dosage formulation and in such amount as is therapeutically effective. The formulations may easily be administered in a variety of dosage forms such as injectable solutions, drug release capsules and the like. For parenteral administration in an aqueous solution, for example, the solution generally is suitably buffered and the liquid diluent first rendered isotonic for example with sufficient saline or glucose. Such aqueous solutions may be used, for example, for intravenous, intramuscular, subcutaneous and intraperitoneal administration. Preferably, sterile aqueous media are employed as is known to those of skill in the art, particularly in light of the present disclosure. By way of illustration, a single dose may be dissolved in 1 ml of isotonic NaCl solution and either added to 1000 ml of hypodermoclysis fluid or injected at the proposed site of infusion, (see for example, “Remington's Pharmaceutical Sciences” 15th Edition, pages 1035-1038 and 1570-1580). Some variation in dosage will necessarily occur depending on the condition of the subject being treated. The person responsible for administration will, in any event, determine the appropriate dose for the individual subject. Moreover, for human administration, preparations should meet sterility, pyrogenicity, general safety and purity standards as required by FDA Office of Biologics standards.

[0350] In some embodiments, the Cas9 or Cpf1 and gRNAs described herein may be delivered to the patient using adoptive cell transfer (ACT). In adoptive cell transfer, one or more expression constructs are provided ex vivo to cells which have originated from the patient (autologous) or from one or more individual(s) other than the patient (allogeneic). The cells are subsequently introduced or reintroduced into the patient. Thus, in some embodiments, one or more nucleic acids encoding Cas9 or Cpf1 and a guide RNA that targets a dystrophin splice site are provided to a cell ex vivo before the cell is introduced or reintroduced to a patient.

[0351] The following tables provide exemplary primer and genomic targeting sequences for use in connection with the compositions and methods disclosed herein.

TABLE 6
Genomic Target Sequences

| | | | | | SEQ ID |
|---|---|---|---|---|---|
| Targeted gRNA Exon | Guide # | Strand | Genomic Target Sequence* | PAM | NO. |
| Human-Exon 51 | 4 | 1 | tctttttcttcttttttccttttt | tttt | 60 |
| Human-Exon 51 | 5 | 1 | ctttttcttcttttttcctttttG | tttt | 61 |
| Human-Exon 51 | 6 | 1 | tttttcttcttttttcctttttGC | tttc | 62 |
| Human-Exon 51 | 7 | 1 | tcttcttttttcctttttGCAAAA | tttt | 63 |
| Human-Exon 51 | 8 | 1 | cttcttttttcctttttGCAAAAA | tttt | 64 |
| Human-Exon 51 | 9 | 1 | ttcttttttcctttttGCAAAAAC | tttc | 65 |
| Human-Exon 51 | 10 | 1 | ttcctttttGCAAAAACCCAAAAT | tttt | 66 |
| Human-Exon 51 | 11 | 1 | tcctttttGCAAAAACCCAAAATA | tttt | 67 |
| Human-Exon 51 | 12 | 1 | cctttttGCAAAAACCCAAAATAT | tttt | 68 |
| Human-Exon 51 | 13 | 1 | ctttttGCAAAAACCCAAAATATT | tttc | 69 |
| Human-Exon 51 | 14 | 1 | tGCAAAAACCCAAAATATTTTAGC | tttt | 70 |
| Human-Exon 51 | 15 | 1 | GCAAAAACCCAAAATATTTTAGCT | tttt | 71 |
| Human-Exon 51 | 16 | 1 | CAAAAACCCAAAATATTTTAGCTC | tttG | 72 |
| Human-Exon 51 | 17 | 1 | AGCTCCTACTCAGACTGTTACTCT | TTTT | 73 |
| Human-Exon 51 | 18 | 1 | GCTCCTACTCAGACTGTTACTCTG | TTTA | 74 |
| Human-Exon 51 | 19 | −1 | CTTAGTAACCACAGGTTGTGTCAC | TTTC | 75 |
| Human-Exon 51 | 20 | −1 | GAGATGGCAGTTTCCTTAGTAACC | TTTG | 76 |
| Human-Exon 51 | 21 | −1 | TAGTTTGGAGATGGCAGTTTCCTT | TTTC | 77 |
| Human-Exon 51 | 22 | −1 | TTCTCATACCTTCTGCTTGATGAT | TTTT | 78 |
| Human-Exon 51 | 23 | −1 | TCATTTTTTCTCATACCTTCTGCT | TTTA | 79 |
| Human-Exon 51 | 24 | −1 | ATCATTTTTTCTCATACCTTCTGC | TTTT | 80 |
| Human-Exon 51 | 25 | −1 | AAGAAAAACTTCTGCCAACTTTTA | TTTA | 81 |
| Human-Exon 51 | 26 | −1 | AAAGAAAAACTTCTGCCAACTTTT | TTTT | 82 |
| Human-Exon 51 | 27 | 1 | TCTTTAAAATGAAGATTTTCCACC | TTTT | 83 |
| Human-Exon 51 | 28 | 1 | CTTTAAAATGAAGATTTTCCACCA | TTTT | 84 |
| Human-Exon 51 | 29 | 1 | TTTAAAATGAAGATTTTCCACCAA | TTTC | 85 |
| Human-Exon 51 | 30 | 1 | AAATGAAGATTTTCCACCAATCAC | TTTA | 86 |
| Human-Exon 51 | 31 | 1 | CCACCAATCACTTTACTCTCCTAG | TTTT | 87 |
| Human-Exon 51 | 32 | 1 | CACCAATCACTTTACTCTCCTAGA | TTTC | 88 |
| Human-Exon 51 | 33 | 1 | CTCTCCTAGACCATTTCCCACCAG | TTTA | 89 |
| Human-Exon 45 | 1 | −1 | agaaaagattaaacagtgtgctac | tttg | 90 |
| Human-Exon 45 | 2 | −1 | tttgagaaaagattaaacagtgtg | TTTa | 91 |
| Human-Exon 45 | 3 | −1 | atttgagaaaagattaaacagtgt | TTTT | 92 |
| Human-Exon 45 | 4 | −1 | Tatttgagaaaagattaaacagtg | TTTT | 93 |
| Human-Exon 45 | 5 | 1 | atcttttctcaaatAAAAAGACAT | ttta | 94 |
| Human-Exon 45 | 6 | 1 | ctcaaatAAAAAGACATGGGGCTT | tttt | 95 |
| Human-Exon 45 | 7 | 1 | tcaaatAAAAAGACATGGGGCTTC | tttc | 96 |
| Human-Exon 45 | 8 | 1 | TGTTTTGCCTTTTTGGTATCTTAC | TTTT | 97 |
| Human-Exon 45 | 9 | 1 | GTTTTGCCTTTTTGGTATCTTACA | TTTT | 98 |
| Human-Exon 45 | 10 | 1 | TTTTGCCTTTTTGGTATCTTACAG | TTTG | 99 |
| Human-Exon 45 | 11 | 1 | GCCTTTTTGGTATCTTACAGGAAC | TTTT | 100 |
| Human-Exon 45 | 12 | 1 | CCTTTTTGGTATCTTACAGGAACT | TTTG | 101 |
| Human-Exon 45 | 13 | 1 | TGGTATCTTACAGGAACTCCAGGA | TTTT | 102 |
| Human-Exon 45 | 14 | 1 | GGTATCTTACAGGAACTCCAGGAT | TTTT | 103 |
| Human-Exon 45 | 15 | −1 | AGGATTGCTGAATTATTTCTTCCC | TTTG | 104 |
| Human-Exon 45 | 16 | −1 | GAGGATTGCTGAATTATTTCTTCC | TTTT | 105 |
| Human-Exon 45 | 17 | −1 | TGAGGATTGCTGAATTATTTCTTC | TTTT | 106 |
| Human-Exon 45 | 18 | −1 | CTGTAGAATACTGGCATCTGTTTT | TTTC | 107 |
| Human-Exon 45 | 19 | −1 | CCTGTAGAATACTGGCATCTGTTT | TTTT | 108 |
| Human-Exon 45 | 20 | −1 | TCCTGTAGAATACTGGCATCTGTT | TTTT | 109 |
| Human-Exon 45 | 21 | −1 | CAGACCTCCTGCCACCGCAGATTC | TTTG | 110 |
| Human-Exon 45 | 22 | −1 | TGTCTGACAGCTGTTTGCAGACCT | TTTC | 111 |
| Human-Exon 45 | 23 | −1 | CTGTCTGACAGCTGTTTGCAGACC | TTTT | 112 |
| Human-Exon 45 | 24 | −1 | TCTGTCTGACAGCTGTTTGCAGAC | TTTT | 113 |
| Human-Exon 45 | 25 | −1 | TTCTGTCTGACAGCTGTTTGCAGA | TTTT | 114 |
| Human-Exon 45 | 26 | −1 | ATTCCTATTAGATCTGTCGCCCTA | TTTC | 115 |
| Human-Exon 45 | 27 | −1 | CATTCCTATTAGATCTGTCGCCCT | TTTT | 116 |
| Human-Exon 45 | 28 | 1 | AGCAGACTTTTTAAGCTTTCTTTA | TTTT | 117 |
| Human-Exon 45 | 29 | 1 | GCAGACTTTTTAAGCTTTCTTTAG | TTTA | 118 |
| Human-Exon 45 | 30 | 1 | TAAGCTTTCTTTAGAAGAATATTT | TTTT | 119 |
| Human-Exon 45 | 31 | 1 | AAGCTTTCTTTAGAAGAATATTTC | TTTT | 120 |
| Human-Exon 45 | 32 | 1 | AGCTTTCTTTAGAAGAATATTTCA | TTTA | 121 |
| Human-Exon 45 | 33 | 1 | TTTAGAAGAATATTTCATGAGAGA | TTTC | 122 |
| Human-Exon 45 | 34 | 1 | GAAGAATATTTCATGAGAGATTAT | TTTA | 123 |
| Human-Exon 44 | 1 | 1 | TCAGTATAACCAAAAAATATACGC | TTTG | 124 |
| Human-Exon 44 | 2 | 1 | acataatccatctatttttcttga | tttt | 125 |
| Human-Exon 44 | 3 | 1 | cataatccatctatttttcttgat | ttta | 126 |
| Human-Exon 44 | 4 | 1 | tcttgatccatatgcttttACCTG | tttt | 127 |
| Human-Exon 44 | 5 | 1 | cttgatccatatgcttttACCTGC | tttt | 128 |
| Human-Exon 44 | 6 | 1 | ttgatccatatgcttttACCTGCA | tttc | 129 |
| Human-Exon 44 | 7 | −1 | TCAACAGATCTGTCAAATCGCCTG | TTTC | 130 |
| Human-Exon 44 | 8 | 1 | ACCTGCAGGCGATTTGACAGATCT | tttt | 131 |
| Human-Exon 44 | 9 | 1 | CCTGCAGGCGATTTGACAGATCTG | tttA | 132 |
| Human-Exon 44 | 10 | 1 | ACAGATCTGTTGAGAAATGGCGGC | TTTG | 133 |
| Human-Exon 44 | 11 | −1 | TATCATAATGAAAACGCCGCCATT | TTTA | 134 |
| Human-Exon 44 | 12 | 1 | CATTATGATATAAAGATATTTAAT | TTTT | 135 |
| Human-Exon 44 | 13 | −1 | TATTTAGCATGTTCCCAATTCTCA | TTTG | 136 |
| Human-Exon 44 | 14 | −1 | GAAAAAACAAATCAAAGACTTACC | TTTC | 137 |
| Human-Exon 44 | 15 | 1 | ATTTGTTTTTTCGAAATTGTATTT | TTTG | 138 |
| Human-Exon 44 | 16 | 1 | TTTTTTCGAAATTGTATTTATCTT | TTTG | 139 |
| Human-Exon 44 | 17 | 1 | TTCGAAATTGTATTTATCTTCAGC | TTTT | 140 |
| Human-Exon 44 | 18 | 1 | TCGAAATTGTATTTATCTTCAGCA | TTTT | 141 |
| Human-Exon 44 | 19 | 1 | CGAAATTGTATTTATCTTCAGCAC | TTTT | 142 |
| Human-Exon 44 | 20 | 1 | GAAATTGTATTTATCTTCAGCACA | TTTC | 143 |
| Human-Exon 44 | 21 | −1 | AGAAGTTAAAGAGTCCAGATGTGC | TTTA | 144 |
| Human-Exon 44 | 22 | 1 | TCTTCAGCACATCTGGACTCTTTA | TTTA | 145 |
| Human-Exon 44 | 23 | −1 | CATCACCCTTCAGAACCTGATCTT | TTTC | 146 |
| Human-Exon 44 | 24 | 1 | ACTTCTTAAAGATCAGGTTCTGAA | TTTA | 147 |
| Human-Exon 44 | 25 | 1 | GACTGTTGTTGTCATCATTATATT | TTTT | 148 |
| Human-Exon 44 | 26 | 1 | ACTGTTGTTGTCATCATTATATTA | TTTG | 149 |
| Human-Exon 53 | 1 | −1 | AACTAGAATAAAAGGAAAAATAAA | TTTC | 150 |
| Human-Exon 53 | 2 | 1 | CTACTATATATTTATTTTTCCTTT | TTTA | 151 |
| Human-Exon 53 | 3 | 1 | TTTTTCCTTTTATTCTAGTTGAAA | TTTA | 152 |
| Human-Exon 53 | 4 | 1 | TCCTTTTATTCTAGTTGAAAGAAT | TTTT | 153 |
| Human-Exon 53 | 5 | 1 | CCTTTTATTCTAGTTGAAAGAATT | TTTT | 154 |
| Human-Exon 53 | 6 | 1 | CTTTTATTCTAGTTGAAAGAATTC | TTTC | 155 |
| Human-Exon 53 | 7 | 1 | ATTCTAGTTGAAAGAATTCAGAAT | TTTT | 156 |
| Human-Exon 53 | 8 | 1 | TTCTAGTTGAAAGAATTCAGAATC | TTTA | 157 |
| Human-Exon 53 | 9 | −1 | ATTCAACTGTTGCCTCCGGTTCTG | TTTC | 158 |
| Human-Exon 53 | 10 | −1 | ACATTTCATTCAACTGTTGCCTCC | TTTA | 159 |
| Human-Exon 53 | 11 | −1 | CTTTTGGATTGCATCTACTGTATA | TTTT | 160 |
| Human-Exon 53 | 12 | −1 | TGTGATTTTCTTTTGGATTGCATC | TTTC | 161 |
| Human-Exon 53 | 13 | −1 | ATACTAACCTTGGTTTCTGTGATT | TTTG | 162 |
| Human-Exon 53 | 14 | −1 | AAAAGGTATCTTTGATACTAACCT | TTTA | 163 |
| Human-Exon 53 | 15 | −1 | AAAAAGGTATCTTTGATACTAACC | TTTT | 164 |
| Human-Exon 53 | 16 | −1 | TTTTAAAAAGGTATCTTTGATACT | TTTA | 165 |
| Human-Exon 53 | 17 | −1 | ATTTTAAAAAGGTATCTTTGATAC | TTTT | 166 |
| Human-Exon 46 | 1 | −1 | TTAATGCAAACTGGGACACAAACA | TTTG | 167 |
| Human-Exon 46 | 2 | 1 | TAAATTGCCATGTTTGTGTCCCAG | TTTT | 168 |
| Human-Exon 46 | 3 | 1 | AAATTGCCATGTTTGTGTCCCAGT | TTTT | 169 |
| Human-Exon 46 | 4 | 1 | AATTGCCATGTTTGTGTCCCAGTT | TTTA | 170 |
| Human-Exon 46 | 5 | 1 | TGTCCCAGTTTGCATTAACAAATA | TTTG | 171 |
| Human-Exon 46 | 6 | −1 | CAACATAGTTCTCAAACTATTTGT | tttC | 172 |
| Human-Exon 46 | 7 | −1 | CCAACATAGTTCTCAAACTATTTG | tttt | 173 |
| Human-Exon 46 | 8 | −1 | tCCAACATAGTTCTCAAACTATTT | tttt | 174 |
| Human-Exon 46 | 9 | −1 | tttCCAACATAGTTCTCAAACTAT | tttt | 175 |
| Human-Exon 46 | 10 | −1 | ttttCCAACATAGTTCTCAAACTA | tttt | 176 |
| Human-Exon 46 | 11 | −1 | tttttCCAACATAGTTCTCAAACT | tttt | 177 |
| Human-Exon 46 | 12 | 1 | CATTAACAAATAGTTTGAGAACTA | TTTG | 178 |
| Human-Exon 46 | 13 | 1 | AGAACTATGTTGGaaaaaaaaaTA | TTTG | 179 |
| Human-Exon 46 | 14 | −1 | GTTCTTCTAGCCTGGAGAAAGAAG | TTTT | 180 |
| Human-Exon 46 | 15 | 1 | ATTCTTCTTTCTCCAGGCTAGAAG | TTTT | 181 |
| Human-Exon 46 | 16 | 1 | TTCTTCTTTCTCCAGGCTAGAAGA | TTTA | 182 |
| Human-Exon 46 | 17 | 1 | TCCAGGCTAGAAGAACAAAAGAAT | TTTC | 183 |
| Human-Exon 46 | 18 | −1 | AAATTCTGACAAGATATTCTTTTG | TTTG | 184 |
| Human-Exon 46 | 19 | −1 | CTTTTAGTTGCTGCTCTTTTCCAG | TTTT | 185 |
| Human-Exon 46 | 20 | −1 | AGAAAATAAAATTACCTTGACTTG | TTTG | 186 |
| Human-Exon 46 | 21 | −1 | TGCAAGCAGGCCCTGGGGGATTTG | TTTA | 187 |
| Human-Exon 46 | 22 | 1 | ATTTTCTCAAATCCCCCAGGGCCT | TTTT | 188 |
| Human-Exon 46 | 23 | 1 | TTTTCTCAAATCCCCCAGGGCCTG | TTTA | 189 |
| Human-Exon 46 | 24 | 1 | CTCAAATCCCCCAGGGCCTGCTTG | TTTT | 190 |
| Human-Exon 46 | 25 | 1 | TCAAATCCCCCAGGGCCTGCTTGC | TTTC | 191 |
| Human-Exon 46 | 26 | 1 | TTAATTCAATCATTGGTTTTCTGC | TTTT | 192 |
| Human-Exon 46 | 27 | 1 | TAATTCAATCATTGGTTTTCTGCC | TTTT | 193 |
| Human-Exon 46 | 28 | 1 | AATTCAATCATTGGTTTTCTGCCC | TTTT | 194 |
| Human-Exon 46 | 29 | 1 | ATTCAATCATTGGTTTTCTGCCCA | TTTA | 195 |
| Human-Exon 46 | 30 | −1 | GCAAGGAACTATGAATAACCTAAT | TTTA | 196 |
| Human-Exon 46 | 31 | 1 | CTGCCCATTAGGTTATTCATAGTT | TTTT | 197 |
| Human-Exon 46 | 32 | 1 | TGCCCATTAGGTTATTCATAGTTC | TTTC | 198 |
| Human-Exon 52 | 1 | −1 | TAGAAAACAATTTAACAGGAAATA | TTTA | 199 |
| Human-Exon 52 | 2 | 1 | CTGTTAAATTGTTTTCTATAAACC | TTTC | 200 |
| Human-Exon 52 | 3 | −1 | GAAATAAAAAAGATGTTACTGTAT | TTTA | 201 |
| Human-Exon 52 | 4 | −1 | AGAAATAAAAAAGATGTTACTGTA | TTTT | 202 |
| Human-Exon 52 | 5 | 1 | CTATAAACCCTTATACAGTAACAT | TTTT | 203 |
| Human-Exon 52 | 6 | 1 | TATAAACCCTTATACAGTAACATC | TTTC | 204 |
| Human-Exon 52 | 7 | 1 | TTATTTCTAAAAGTGTTTTGGCTG | TTTT | 205 |
| Human-Exon 52 | 8 | 1 | TATTTCTAAAAGTGTTTTGGCTGG | TTTT | 206 |
| Human-Exon 52 | 9 | 1 | ATTTCTAAAAGTGTTTTGGCTGGT | TTTT | 207 |
| Human-Exon 52 | 10 | 1 | TTTCTAAAAGTGTTTTGGCTGGTC | TTTA | 208 |
| Human-Exon 52 | 11 | 1 | TAAAAGTGTTTTGGCTGGTCTCAC | TTTC | 209 |
| Human-Exon 52 | 12 | −1 | CATAATACAAAGTAAAGTACAATT | TTTA | 210 |
| Human-Exon 52 | 13 | −1 | ACATAATACAAAGTAAAGTACAAT | TTTT | 211 |
| Human-Exon 52 | 14 | 1 | GGCTGGTCTCACAATTGTACTTTA | TTTT | 212 |
| Human-Exon 52 | 15 | 1 | GCTGGTCTCACAATTGTACTTTAC | TTTG | 213 |
| Human-Exon 52 | 16 | 1 | CTTTGTATTATGTAAAAGGAATAC | TTTA | 214 |
| Human-Exon 52 | 17 | 1 | TATTATGTAAAAGGAATACACAAC | TTTG | 215 |
| Human-Exon 52 | 18 | 1 | TTCTTACAGGCAACAATGCAGGAT | TTTG | 216 |
| Human-Exon 52 | 19 | 1 | GAACAGAGGCGTCCCCAGTTGGAA | TTTG | 217 |
| Human-Exon 52 | 20 | −1 | GGCAGCGGTAATGAGTTCTTCCAA | TTTG | 218 |
| Human-Exon 52 | 21 | −1 | TCAAATTTTGGGCAGCGGTAATGA | TTTT | 219 |
| Human-Exon 52 | 22 | 1 | AAAAACAAGACCAGCAATCAAGAG | TTTG | 220 |
| Human-Exon 52 | 23 | −1 | TGTGTCCCATGCTTGTTAAAAAAC | TTTG | 221 |
| Human-Exon 52 | 24 | 1 | TTAACAAGCATGGGACACACAAAG | TTTT | 222 |
| Human-Exon 52 | 25 | 1 | TAACAAGCATGGGACACACAAAGC | TTTT | 223 |
| Human-Exon 52 | 26 | 1 | AACAAGCATGGGACACACAAAGCA | TTTT | 224 |
| Human-Exon 52 | 27 | 1 | ACAAGCATGGGACACACAAAGCAA | TTTA | 225 |
| Human-Exon 52 | 28 | −1 | TTGAAACTTGTCATGCATCTTGCT | TTTA | 226 |
| Human-Exon 52 | 29 | −1 | ATTGAAACTTGTCATGCATCTTGC | TTTT | 227 |
| Human-Exon 52 | 30 | −1 | TATTGAAACTTGTCATGCATCTTG | TTTT | 228 |
| Human-Exon 52 | 31 | 1 | AATAAAAACTTAAGTTCATATATC | TTTC | 229 |
| Human-Exon 50 | 1 | −1 | GTGAATATATTATTGGATTTCTAT | TTTG | 230 |
| Human-Exon 50 | 2 | −1 | AAGATAATTCATGAACATCTTAAT | TTTG | 231 |
| Human-Exon 50 | 3 | −1 | ACAGAAAAGCATACACATTACTTA | TTTA | 232 |
| Human-Exon 50 | 4 | 1 | CTGTTAAAGAGGAAGTTAGAAGAT | TTTT | 233 |
| Human-Exon 50 | 5 | 1 | TGTTAAAGAGGAAGTTAGAAGATC | TTTC | 234 |
| Human-Exon 50 | 6 | −1 | CCGCCTTCCACTCAGAGCTCAGAT | TTTA | 235 |
| Human-Exon 50 | 7 | −1 | CCCTCAGCTCTTGAAGTAAACGGT | TTTG | 236 |
| Human-Exon 50 | 8 | 1 | CTTCAAGAGCTGAGGGCAAAGCAG | TTTA | 237 |
| Human-Exon 50 | 9 | −1 | AACAAATAGCTAGAGCCAAAGAGA | TTTG | 238 |
| Human-Exon 50 | 10 | −1 | GAACAAATAGCTAGAGCCAAAGAG | TTTT | 239 |
| Human-Exon 50 | 11 | 1 | GCTCTAGCTATTTGTTCAAAAGTG | TTTG | 240 |
| Human-Exon 50 | 12 | 1 | TTCAAAAGTGCAACTATGAAGTGA | TTTG | 241 |
| Human-Exon 50 | 13 | −1 | TCTCTCACCCAGTCATCACTTCAT | TTTC | 242 |
| Human-Exon 50 | 14 | −1 | CTCTCTCACCCAGTCATCACTTCA | TTTT | 243 |
| Human-Exon 43 | 1 | 1 | tatatatatatatatTTTTCTCTT | TTTG | 244 |
| Human-Exon 43 | 2 | 1 | TCTCTTTCTATAGACAGCTAATTC | tTTT | 245 |
| Human-Exon 43 | 3 | 1 | CTCTTTCTATAGACAGCTAATTCA | TTTT | 246 |
| Human-Exon 43 | 4 | −1 | AAACAGTAAAAAAATGAATTAGCT | TTTA | 247 |
| Human-Exon 43 | 5 | 1 | TCTTTCTATAGACAGCTAATTCAT | TTTC | 248 |
| Human-Exon 43 | 6 | −1 | AAAACAGTAAAAAAATGAATTAGC | TTTT | 249 |
| Human-Exon 43 | 7 | 1 | TATAGACAGCTAATTCATTTTTTT | TTTC | 250 |
| Human-Exon 43 | 8 | −1 | TATTCTGTAATATAAAAATTTTAA | TTTA | 251 |
| Human-Exon 43 | 9 | −1 | ATATTCTGTAATATAAAAATTTTA | TTTT | 252 |
| Human-Exon 43 | 10 | 1 | TTTACTGTTTTAAAATTTTTATAT | TTTT | 253 |
| Human-Exon 43 | 11 | 1 | TTACTGTTTTAAAATTTTTATATT | TTTT | 254 |
| Human-Exon 43 | 12 | 1 | TACTGTTTTAAAATTTTTATATTA | TTTT | 255 |
| Human-Exon 43 | 13 | 1 | ACTGTTTTAAAATTTTTATATTAC | TTTT | 256 |
| Human-Exon 43 | 14 | 1 | CTGTTTTAAAATTTTTATATTACA | TTTA | 257 |
| Human-Exon 43 | 15 | 1 | AAAATTTTTATATTACAGAATATA | TTTT | 258 |
| Human-Exon 43 | 16 | 1 | AAATTTTTATATTACAGAATATAA | TTTA | 259 |
| Human-Exon 43 | 17 | −1 | TTGTAGACTATCTTTTATATTCTG | TTTG | 260 |
| Human-Exon 43 | 18 | 1 | TATATTACAGAATATAAAAGATAG | TTTT | 261 |
| Human-Exon 43 | 19 | 1 | ATATTACAGAATATAAAAGATAGT | TTTT | 262 |
| Human-Exon 43 | 20 | 1 | TATTACAGAATATAAAAGATAGTC | TTTA | 263 |
| Human-Exon 43 | 21 | −1 | CAATGCTGCTGTCTTCTTGCTATG | TTTG | 264 |
| Human-Exon 43 | 22 | 1 | CAATGGGAAAAAGTTAACAAAATG | TTTC | 265 |
| Human-Exon 43 | 23 | −1 | TGCAAGTATCAAGAAAAATATATG | TTTC | 266 |
| Human-Exon 43 | 24 | 1 | TCTTGATACTTGCAGAAATGATTT | TTTT | 267 |
| Human-Exon 43 | 25 | 1 | CTTGATACTTGCAGAAATGATTTG | TTTT | 268 |
| Human-Exon 43 | 26 | 1 | TTGATACTTGCAGAAATGATTTGT | TTTC | 269 |
| Human-Exon 43 | 27 | 1 | TTTTCAGGGAACTGTAGAATTTAT | TTTG | 270 |
| Human-Exon 43 | 28 | −1 | CATGGAGGGTACTGAAATAAATTC | TTTC | 271 |
| Human-Exon 43 | 29 | −1 | CCATGGAGGGTACTGAAATAAATT | TTTT | 272 |
| Human-Exon 43 | 30 | 1 | CAGGGAACTGTAGAATTTATTTCA | TTTT | 273 |
| Human-Exon 43 | 31 | −1 | TCCATGGAGGGTACTGAAATAAAT | TTTT | 274 |
| Human-Exon 43 | 32 | 1 | AGGGAACTGTAGAATTTATTTCAG | TTTC | 275 |
| Human-Exon 43 | 33 | −1 | TTCCATGGAGGGTACTGAAATAAA | TTTT | 276 |
| Human-Exon 43 | 34 | −1 | CCTGTCTTTTTTCCATGGAGGGTA | TTTC | 277 |
| Human-Exon 43 | 35 | −1 | CCCTGTCTTTTTTCCATGGAGGGT | TTTT | 278 |
| Human-Exon 43 | 36 | −1 | TCCCTGTCTTTTTTCCATGGAGGG | TTTT | 279 |
| Human-Exon 43 | 37 | 1 | TTTCAGTACCCTCCATGGAAAAAA | TTTA | 280 |
| Human-Exon 43 | 38 | 1 | AGTACCCTCCATGGAAAAAAGACA | TTTC | 281 |
| Human-Exon 6 | 1 | 1 | AGTTTGCATGGTTCTTGCTCAAGG | TTTA | 282 |
| Human-Exon 6 | 2 | −1 | ATAAGAAAATGCATTCCTTGAGCA | TTTC | 283 |
| Human-Exon 6 | 3 | −1 | CATAAGAAAATGCATTCCTTGAGC | TTTT | 284 |
| Human-Exon 6 | 4 | 1 | CATGGTTCTTGCTCAAGGAATGCA | TTTG | 285 |
| Human-Exon 6 | 5 | −1 | ACCTACATGTGGAAATAAATTTTC | TTTG | 286 |
| Human-Exon 6 | 6 | −1 | GACCTACATGTGGAAATAAATTTT | TTTT | 287 |
| Human-Exon 6 | 7 | −1 | TGACCTACATGTGGAAATAAATTT | TTTT | 288 |
| Human-Exon 6 | 8 | 1 | CTTATGAAAATTTATTTCCACATG | TTTT | 289 |
| Human-Exon 6 | 9 | 1 | TTATGAAAATTTATTTCCACATGT | TTTC | 290 |
| Human-Exon 6 | 10 | −1 | ATTACATTTTTGACCTACATGTGG | TTTC | 291 |
| Human-Exon 6 | 11 | −1 | CATTACATTTTTGACCTACATGTG | TTTT | 292 |
| Human-Exon 6 | 12 | −1 | TCATTACATTTTTGACCTACATGT | TTTT | 293 |
| Human-Exon 6 | 13 | 1 | TTTCCACATGTAGGTCAAAAATGT | TTTA | 294 |
| Human-Exon 6 | 14 | 1 | CACATGTAGGTCAAAAATGTAATG | TTTC | 295 |
| Human-Exon 6 | 15 | −1 | TTGCAATCCAGCCATGATATTTTT | TTTG | 296 |
| Human-Exon 6 | 16 | −1 | ACTGTTGGTTTGTTGCAATCCAGC | TTTC | 297 |
| Human-Exon 6 | 17 | −1 | CACTGTTGGTTTGTTGCAATCCAG | TTTT | 298 |
| Human-Exon 6 | 18 | 1 | AATGCTCTCATCCATAGTCATAGG | TTTG | 299 |
| Human-Exon 6 | 19 | −1 | ATGTCTCAGTAATCTTCTTACCTA | TTTA | 300 |
| Human-Exon 6 | 20 | −1 | CAAGTTATTTAATGTCTCAGTAAT | TTTA | 301 |
| Human-Exon 6 | 21 | −1 | ACAAGTTATTTAATGTCTCAGTAA | TTTT | 302 |
| Human-Exon 6 | 22 | 1 | GACTCTGATGACATATTTTTCCCC | TTTA | 303 |
| Human-Exon 6 | 23 | 1 | TCCCCAGTATGGTTCCAGATCATG | TTTT | 304 |
| Human-Exon 6 | 24 | 1 | CCCCAGTATGGTTCCAGATCATGT | TTTT | 305 |
| Human-Exon 6 | 25 | 1 | CCCAGTATGGTTCCAGATCATGTC | TTTC | 306 |
| Human-Exon 7 | 1 | 1 | TATTTGTCTTtgtgtatgtgtgta | TTTA | 307 |
| Human-Exon 7 | 2 | 1 | TCTTtgtgtatgtgtgtatgtgta | TTTG | 308 |
| Human-Exon 7 | 3 | 1 | tgtatgtgtgtatgtgtatgtgtt | TTtg | 309 |
| Human-Exon 7 | 4 | 1 | AGGCCAGACCTATTTGACTGGAAT | ttTT | 310 |
| Human-Exon 7 | 5 | 1 | GGCCAGACCTATTTGACTGGAATA | tTTA | 311 |
| Human-Exon 7 | 6 | 1 | ACTGGAATAGTGTGGTTTGCCAGC | TTTG | 312 |
| Human-Exon 7 | 7 | 1 | CCAGCAGTCAGCCACACAACGACT | TTTG | 313 |
| Human-Exon 7 | 8 | −1 | TCTATGCCTAATTGATATCTGGCG | TTTC | 314 |
| Human-Exon 7 | 9 | −1 | CCAACCTTCAGGATCGAGTAGTTT | TTTA | 315 |
| Human-Exon 7 | 10 | 1 | TGGACTACCACTGCTTTTAGTATG | TTTC | 316 |
| Human-Exon 7 | 11 | 1 | AGTATGGTAGAGTTTAATGTTTTC | TTTT | 317 |
| Human-Exon 7 | 12 | 1 | GTATGGTAGAGTTTAATGTTTTCA | TTTA | 318 |
| Human-Exon 8 | 1 | −1 | AGACTCTAAAAGGATAATGAACAA | TTTG | 319 |
| Human-Exon 8 | 2 | 1 | ACTTTGATTTGTTCATTATCCTTT | TTTA | 320 |
| Human-Exon 8 | 3 | −1 | TATATTTGAGACTCTAAAAGGATA | TTTC | 321 |
| Human-Exon 8 | 4 | 1 | ATTTGTTCATTATCCTTTTAGAGT | TTTG | 322 |
| Human-Exon 8 | 5 | −1 | GTTTCTATATTTGAGACTCTAAAA | TTTG | 323 |
| Human-Exon 8 | 6 | −1 | GGTTTCTATATTTGAGACTCTAAA | TTTT | 324 |
| Human-Exon 8 | 7 | −1 | TGGTTTCTATATTTGAGACTCTAA | TTTT | 325 |
| Human-Exon 8 | 8 | 1 | TTCATTATCCTTTTAGAGTCTCAA | TTTG | 326 |
| Human-Exon 8 | 9 | 1 | AGAGTCTCAAATATAGAAACCAAA | TTTT | 327 |
| Human-Exon 8 | 10 | 1 | GAGTCTCAAATATAGAAACCAAAA | TTTA | 328 |
| Human-Exon 8 | 11 | −1 | CACTTCCTGGATGGCTTCAATGCT | TTTC | 329 |
| Human-Exon 8 | 12 | 1 | GCCTCAACAAGTGAGCATTGAAGC | TTTT | 330 |
| Human-Exon 8 | 13 | 1 | CCTCAACAAGTGAGCATTGAAGCC | TTTG | 331 |
| Human-Exon 8 | 14 | −1 | GGTGGCCTTGGCAACATTTCCACT | TTTA | 332 |
| Human-Exon 8 | 15 | −1 | GTCACTTTAGGTGGCCTTGGCAAC | TTTA | 333 |
| Human-Exon 8 | 16 | −1 | ATGATGTAACTGAAAATGTTCTTC | TTTG | 334 |
| Human-Exon 8 | 17 | −1 | CCTGTTGAGAATAGTGCATTTGAT | TTTA | 335 |
| Human-Exon 8 | 18 | 1 | CAGTTACATCATCAAATGCACTAT | TTTT | 336 |
| Human-Exon 8 | 19 | 1 | AGTTACATCATCAAATGCACTATT | TTTC | 337 |
| Human-Exon 8 | 20 | −1 | CACACTTTACCTGTTGAGAATAGT | TTTA | 338 |
| Human-Exon 8 | 21 | 1 | CTGTTTTATATGCATTTTTAGGTA | TTTT | 339 |
| Human-Exon 8 | 22 | 1 | TGTTTTATATGCATTTTTAGGTAT | TTTC | 340 |
| Human-Exon 8 | 23 | 1 | ATATGCATTTTTAGGTATTACGTG | TTTT | 341 |
| Human-Exon 8 | 24 | 1 | TATGCATTTTTAGGTATTACGTGC | TTTA | 342 |
| Human-Exon 8 | 25 | 1 | TAGGTATTACGTGCACatatatat | TTTT | 343 |
| Human-Exon 8 | 26 | 1 | AGGTATTACGTGCACatatatata | TTTT | 344 |
| Human-Exon 8 | 27 | 1 | GGTATTACGTGCACatatatatat | TTTA | 345 |
| Human-Exon 55 | 1 | −1 | AGCAACAACTATAATATTGTGCAG | TTTA | 346 |
| Human-Exon 55 | 2 | 1 | GTTCCTCCATCTTTCTCTTTTTAT | TTTA | 347 |
| Human-Exon 55 | 3 | 1 | TCTTTTTATGGAGTTCACTAGGTG | TTTC | 348 |
| Human-Exon 55 | 4 | 1 | TATGGAGTTCACTAGGTGCACCAT | TTTT | 349 |
| Human-Exon 55 | 5 | 1 | ATGGAGTTCACTAGGTGCACCATT | TTTT | 350 |
| Human-Exon 55 | 6 | 1 | TGGAGTTCACTAGGTGCACCATTC | TTTA | 351 |
| Human-Exon 55 | 7 | 1 | ATAATTGCATCTGAACATTTGGTC | TTTA | 352 |
| Human-Exon 55 | 8 | 1 | GTCCTTTGCAGGGTGAGTGAGCGA | TTTG | 353 |
| Human-Exon 55 | 9 | −1 | TTCCAAAGCAGCCTCTCGCTCACT | TTTC | 354 |
| Human-Exon 55 | 10 | 1 | CAGGGTGAGTGAGCGAGAGGCTGC | TTTG | 355 |
| Human-Exon 55 | 11 | 1 | GAAGAAACTCATAGATTACTGCAA | TTTG | 356 |
| Human-Exon 55 | 12 | −1 | CAGGTCCAGGGGGAACTGTTGCAG | TTTC | 357 |
| Human-Exon 55 | 13 | −1 | CCAGGTCCAGGGGGAACTGTTGCA | TTTT | 358 |
| Human-Exon 55 | 14 | −1 | AGCTTCTGTAAGCCAGGCAAGAAA | TTTC | 359 |
| Human-Exon 55 | 15 | 1 | TTGCCTGGCTTACAGAAGCTGAAA | TTTC | 360 |
| Human-Exon 55 | 16 | −1 | CTTACGGGTAGCATCCTGTAGGAC | TTTC | 361 |
| Human-Exon 55 | 17 | −1 | CTCCCTTGGAGTCTTCTAGGAGCC | TTTA | 362 |
| Human-Exon 55 | 18 | −1 | ACTCCCTTGGAGTCTTCTAGGAGC | TTTT | 363 |
| Human-Exon 55 | 19 | −1 | ATCAGCTCTTTTACTCCCTTGGAG | TTTC | 364 |
| Human-Exon 55 | 20 | 1 | CGCTTTAGCACTCTTGTGGATCCA | TTTC | 365 |
| Human-Exon 55 | 21 | 1 | GCACTCTTGTGGATCCAATTGAAC | TTTA | 366 |
| Human-Exon 55 | 22 | −1 | TCCCTGGCTTGTCAGTTACAAGTA | TTTG | 367 |
| Human-Exon 55 | 23 | −1 | GTCCCTGGCTTGTCAGTTACAAGT | TTTT | 368 |
| Human-Exon 55 | 24 | −1 | TTTTGTCCCTGGCTTGTCAGTTAC | TTTG | 369 |
| Human-Exon 55 | 25 | −1 | GTTTTGTCCCTGGCTTGTCAGTTA | TTTT | 370 |
| Human-Exon 55 | 26 | 1 | TACTTGTAACTGACAAGCCAGGGA | TTTG | 371 |
| Human-G1-exon51 | | 1 | gCTCCTACTCAGACTGTTACTCTG | TTTA | 372 |
| Human-G2-exon51 | | 1 | taccatgtattgctaaacaaagta | TTTC | 373 |
| Human-G3-exon51 | | −1 | attgaagagtaacaatttgagcca | TTTA | 374 |
| mouse-Exon23-G1 | | 1 | aggctctgcaaagttctTTGAAAG | TTTG | 375 |
| mouse-Exon23-G2 | | 1 | AAAGAGCAACAAAATGGCttcaac | TTTG | 376 |
| mouse-Exon23-G3 | | 1 | AAAGAGCAATAAAATGGCttcaac | TTTG | 377 |
| mouse-Exon23-G4 | | −1 | AAAGAACTTTGCAGAGCctcaaaa | TTTC | 378 |
| mouse-Exon23-G5 | | −1 | ctgaatatctatgcattaataact | TTTA | 379 |
| mouse-Exon23-G6 | | −1 | tattatattacagggcatattata | TTTC | 380 |
| mouse-Exon23-G7 | | 1 | Aggtaagccgaggtttggccttta | TTTC | 381 |
| mouse-Exon23-G8 | | 1 | cccagagtccttcaaagatattga | TTTA | 382 |

*In this table, upper case letters represent nucleotides that align to the exon sequence of the gene. Lower case letters represent nucleotides that align to the intron sequence of the gene.

TABLE 7
gRNA sequences

| | | | | | SEQ ID |
|---|---|---|---|---|---|
| Targeted gRNA Exon | Guide # | Strand | gRNA sequence* | PAM | NO. |
| Human-Exon 51 | 4 | 1 | aaaaaggaaaaaagaagaaaaaga | tttt | 383 |
| Human-Exon 51 | 5 | 1 | Caaaaaggaaaaaagaagaaaaag | tttt | 384 |
| Human-Exon 51 | 6 | 1 | GCaaaaaggaaaaaagaagaaaaa | tttc | 385 |
| Human-Exon 51 | 7 | 1 | UUUUGCaaaaaggaaaaaagaaga | tttt | 386 |
| Human-Exon 51 | 8 | 1 | UUUUUGCaaaaaggaaaaaagaag | tttt | 387 |
| Human-Exon 51 | 9 | 1 | GUUUUUGCaaaaaggaaaaaagaa | tttc | 388 |
| Human-Exon 51 | 10 | 1 | AUUUUGGGUUUUUGCaaaaaggaa | tttt | 389 |
| Human-Exon 51 | 11 | 1 | UAUUUUGGGUUUUUGCaaaaagga | tttt | 390 |
| Human-Exon 51 | 12 | 1 | AUAUUUUGGGUUUUUGCaaaaagg | tttt | 391 |
| Human-Exon 51 | 13 | 1 | AAUAUUUUGGGUUUUUGCaaaaag | tttc | 392 |
| Human-Exon 51 | 14 | 1 | GCUAAAAUAUUUUGGGUUUUUGCa | tttt | 393 |
| Human-Exon 51 | 15 | 1 | AGCUAAAAUAUUUUGGGUUUUUGC | tttt | 394 |
| Human-Exon 51 | 16 | 1 | GAGCUAAAAUAUUUUGGGUUUUUG | tttG | 395 |
| Human-Exon 51 | 17 | 1 | AGAGUAACAGUCUGAGUAGGAGCU | TTTT | 396 |
| Human-Exon 51 | 18 | 1 | CAGAGUAACAGUCUGAGUAGGAGC | TTTA | 397 |
| Human-Exon 51 | 19 | −1 | GUGACACAACCUGUGGUUACUAAG | TTTC | 398 |
| Human-Exon 51 | 20 | −1 | GGUUACUAAGGAAACUGCCAUCU | TTTG | 399 |
| Human-Exon 51 | 21 | −1 | AAGGAAACUGCCAUCUCCAAACUA | TTTC | 400 |
| Human-Exon 51 | 22 | −1 | AUCAUCAAGCAGAAGGUAUGAGAA | TTTT | 401 |
| Human-Exon 51 | 23 | −1 | AGCAGAAGGUAUGAGAAAAAAUGA | TTTA | 402 |
| Human-Exon 51 | 24 | −1 | GCAGAAGGUAUGAGAAAAAAUGAU | TTTT | 403 |
| Human-Exon 51 | 25 | −1 | UAAAAGUUGGCAGAAGUUUUUCUU | TTTA | 404 |
| Human-Exon 51 | 26 | −1 | AAAAGUUGGCAGAAGUUUUUCUUU | TTTT | 405 |
| Human-Exon 51 | 27 | 1 | GGUGGAAAAUCUUCAUUUUAAAGA | TTTT | 406 |
| Human-Exon 51 | 28 | 1 | UGGUGGAAAAUCUUCAUUUUAAAG | TTTT | 407 |
| Human-Exon 51 | 29 | 1 | UUGGUGGAAAAUCUUCAUUUUAAA | TTTC | 408 |
| Human-Exon 51 | 30 | 1 | GUGAUUGGUGGAAAAUCUUCAUUU | TTTA | 409 |
| Human-Exon 51 | 31 | 1 | CUAGGAGAGUAAAGUGAUUGGUGG | TTTT | 410 |
| Human-Exon 51 | 32 | 1 | UCUAGGAGAGUAAAGUGAUUGGUG | TTTC | 411 |
| Human-Exon 51 | 33 | 1 | CUGGUGGGAAAUGGUCUAGGAGA | TTTA | 412 |
| Human-Exon 45 | 1 | −1 | guagcacacuguuuaaucuuuucu | tttg | 413 |
| Human-Exon 45 | 2 | −1 | cacacuguuuaaucuuuucucaaa | TTTa | 414 |
| Human-Exon 45 | 3 | −1 | acacuguuuaaucuuuucucaaau | TTTT | 415 |
| Human-Exon 45 | 4 | −1 | cacuguuuaaucuuuucucaaauA | TTTT | 416 |
| Human-Exon 45 | 5 | 1 | AUGUCUUUUUauuugagaaaagau | ttta | 417 |
| Human-Exon 45 | 6 | 1 | AAGCCCCAUGUCUUUUUauuugag | tttt | 418 |
| Human-Exon 45 | 7 | 1 | GAAGCCCCAUGUCUUUUUauuuga | tttc | 419 |
| Human-Exon 45 | 8 | 1 | GUAAGAUACCAAAAAGGCAAAACA | TTTT | 420 |
| Human-Exon 45 | 9 | 1 | UGUAAGAUACCAAAAAGGCAAAAC | TTTT | 421 |
| Human-Exon 45 | 10 | 1 | CUGUAAGAUACCAAAAAGGCAAAA | TTTG | 422 |
| Human-Exon 45 | 11 | 1 | GUUCCUGUAAGAUACCAAAAAGGC | TTTT | 423 |
| Human-Exon 45 | 12 | 1 | AGUUCCUGUAAGAUACCAAAAAGG | TTTG | 424 |
| Human-Exon 45 | 13 | 1 | UCCUGGAGUUCCUGUAAGAUACCA | TTTT | 425 |
| Human-Exon 45 | 14 | 1 | AUCCUGGAGUUCCUGUAAGAUACC | TTTT | 426 |
| Human-Exon 45 | 15 | −1 | GGGAAGAAAUAAUUCAGCAAUCCU | TTTG | 427 |
| Human-Exon 45 | 16 | −1 | GGAAGAAAUAAUUCAGCAAUCCUC | TTTT | 428 |
| Human-Exon 45 | 17 | −1 | GAAGAAAUAAUUCAGCAAUCCUCA | TTTT | 429 |
| Human-Exon 45 | 18 | −1 | AAAACAGAUGCCAGUAUUCUACAG | TTTC | 430 |
| Human-Exon 45 | 19 | −1 | AAACAGAUGCCAGUAUUCUACAGG | TTTT | 431 |
| Human-Exon 45 | 20 | −1 | AACAGAUGCCAGUAUUCUACAGGA | TTTT | 432 |
| Human-Exon 45 | 21 | −1 | GAAUCUGCGGUGGCAGGAGGUCUG | TTTG | 433 |
| Human-Exon 45 | 22 | −1 | AGGUCUGCAAACAGCUGUCAGACA | TTTC | 434 |
| Human-Exon 45 | 23 | −1 | GGUCUGCAAACAGCUGUCAGACAG | TTTT | 435 |
| Human-Exon 45 | 24 | −1 | GUCUGCAAACAGCUGUCAGACAGA | TTTT | 436 |
| Human-Exon 45 | 25 | −1 | UCUGCAAACAGCUGUCAGACAGAA | TTTT | 437 |
| Human-Exon 45 | 26 | −1 | UAGGGCGACAGAUCUAAUAGGAAU | TTTC | 438 |
| Human-Exon 45 | 27 | −1 | AGGGCGACAGAUCUAAUAGGAAUG | TTTT | 439 |
| Human-Exon 45 | 28 | 1 | UAAAGAAAGCUUAAAAAGUCUGCU | TTTT | 440 |
| Human-Exon 45 | 29 | 1 | CUAAAGAAAGCUUAAAAAGUCUGC | TTTA | 441 |
| Human-Exon 45 | 30 | 1 | AAAUAUUCUUCUAAAGAAAGCUUA | TTTT | 442 |
| Human-Exon 45 | 31 | 1 | GAAAUAUUCUUCUAAAGAAAGCUU | TTTT | 443 |
| Human-Exon 45 | 32 | 1 | UGAAAUAUUCUUCUAAAGAAAGCU | TTTA | 444 |
| Human-Exon 45 | 33 | 1 | UCUCUCAUGAAAUAUUCUUCUAAA | TTTC | 445 |
| Human-Exon 45 | 34 | 1 | AUAAUCUCUCAUGAAAUAUUCUUC | TTTA | 446 |
| Human-Exon 44 | 1 | 1 | GCGUAUAUUUUUUGGUUAUACUGA | TTTG | 447 |
| Human-Exon 44 | 2 | 1 | ucaagaaaaauagauggauuaugu | tttt | 448 |
| Human-Exon 44 | 3 | 1 | aucaagaaaaauagauggauuaug | ttta | 449 |
| Human-Exon 44 | 4 | 1 | CAGGUaaaagcauauggaucaaga | tttt | 450 |
| Human-Exon 44 | 5 | 1 | GCAGGUaaaagcauauggaucaag | tttt | 451 |
| Human-Exon 44 | 6 | 1 | UGCAGGUaaaagcauauggaucaa | tttc | 452 |
| Human-Exon 44 | 7 | −1 | CAGGCGAUUUGACAGAUCUGUUGA | TTTC | 453 |
| Human-Exon 44 | 8 | 1 | AGAUCUGUCAAAUCGCCUGCAGGU | tttt | 454 |
| Human-Exon 44 | 9 | 1 | CAGAUCUGUCAAAUCGCCUGCAGG | tttA | 455 |
| Human-Exon 44 | 10 | 1 | GCCGCCAUUUCUCAACAGAUCUGU | TTTG | 456 |
| Human-Exon 44 | 11 | −1 | AAUGGCGGCGUUUUCAUUAUGAUA | TTTA | 457 |
| Human-Exon 44 | 12 | 1 | AUUAAAUAUCUUUAUAUCAUAAUG | TTTT | 458 |
| Human-Exon 44 | 13 | −1 | UGAGAAUUGGGAACAUGCUAAAUA | TTTG | 459 |
| Human-Exon 44 | 14 | −1 | GGUAAGUCUUUGAUUUGUUUUUUC | TTTC | 460 |
| Human-Exon 44 | 15 | 1 | AAAUACAAUUUCGAAAAAACAAAU | TTTG | 461 |
| Human-Exon 44 | 16 | 1 | AAGAUAAAUACAAUUUCGAAAAAA | TTTG | 462 |
| Human-Exon 44 | 17 | 1 | GCUGAAGAUAAAUACAAUUUCGAA | TTTT | 463 |
| Human-Exon 44 | 18 | 1 | UGCUGAAGAUAAAUACAAUUUCGA | TTTT | 464 |
| Human-Exon 44 | 19 | 1 | GUGCUGAAGAUAAAUACAAUUUCG | TTTT | 465 |
| Human-Exon 44 | 20 | 1 | UGUGCUGAAGAUAAAUACAAUUUC | TTTC | 466 |
| Human-Exon 44 | 21 | −1 | GCACAUCUGGACUCUUUAACUUCU | TTTA | 467 |
| Human-Exon 44 | 22 | 1 | UAAAGAGUCCAGAUGUGCUGAAGA | TTTA | 468 |
| Human-Exon 44 | 23 | −1 | AAGAUCAGGUUCUGAAGGGUGAUG | TTTC | 469 |
| Human-Exon 44 | 24 | 1 | UUCAGAACCUGAUCUUUAAGAAGU | TTTA | 470 |
| Human-Exon 44 | 25 | 1 | AAUAUAAUGAUGACAACAACAGUC | TTTT | 471 |
| Human-Exon 44 | 26 | 1 | UAAUAUAAUGAUGACAACAACAGU | TTTG | 472 |
| Human-Exon 53 | 1 | −1 | UUUAUUUUUCCUUUUAUUCUAGUU | TTTC | 473 |
| Human-Exon 53 | 2 | 1 | AAAGGAAAAAUAAAUAUAUAGUAG | TTTA | 474 |
| Human-Exon 53 | 3 | 1 | UUUCAACUAGAAUAAAAGGAAAAA | TTTA | 475 |
| Human-Exon 53 | 4 | 1 | AUUCUUUCAACUAGAAUAAAAGGA | TTTT | 476 |
| Human-Exon 53 | 5 | 1 | AAUUCUUUCAACUAGAAUAAAAGG | TTTT | 477 |
| Human-Exon 53 | 6 | 1 | GAAUUCUUUCAACUAGAAUAAAAG | TTTC | 478 |
| Human-Exon 53 | 7 | 1 | AUUCUGAAUUCUUUCAACUAGAAU | TTTT | 479 |
| Human-Exon 53 | 8 | 1 | GAUUCUGAAUUCUUUCAACUAGAA | TTTA | 480 |
| Human-Exon 53 | 9 | −1 | CAGAACCGGAGGCAACAGUUGAAU | TTTC | 481 |
| Human-Exon 53 | 10 | −1 | GGAGGCAACAGUUGAAUGAAAUGU | TTTA | 482 |
| Human-Exon 53 | 11 | −1 | UAUACAGUAGAUGCAAUCCAAAAG | TTTT | 483 |
| Human-Exon 53 | 12 | −1 | GAUGCAAUCCAAAAGAAAAUCACA | TTTC | 484 |
| Human-Exon 53 | 13 | −1 | AAUCACAGAAACCAAGGUUAGUAU | TTTG | 485 |
| Human-Exon 53 | 14 | −1 | AGGUUAGUAUCAAAGAUACCUUU | TTTA | 486 |
| Human-Exon 53 | 15 | −1 | GGUUAGUAUCAAAGAUACCUUUUU | TTTT | 487 |
| Human-Exon 53 | 16 | −1 | AGUAUCAAAGAUACCUUUUUAAAA | TTTA | 488 |
| Human-Exon 53 | 17 | −1 | GUAUCAAAGAUACCUUUUUAAAAU | TTTT | 489 |
| Human-Exon 46 | 1 | −1 | UGUUUGUGUCCCAGUUUGCAUUAA | TTTG | 490 |
| Human-Exon 46 | 2 | 1 | CUGGGACACAAACAUGGCAAUUUA | TTTT | 491 |
| Human-Exon 46 | 3 | 1 | ACUGGGACACAAACAUGGCAAUUU | TTTT | 492 |
| Human-Exon 46 | 4 | 1 | AACUGGGACACAAACAUGGCAAUU | TTTA | 493 |
| Human-Exon 46 | 5 | 1 | UAUUUGUUAAUGCAAACUGGGACA | TTTG | 494 |
| Human-Exon 46 | 6 | −1 | ACAAAUAGUUUGAGAACUAUGUUG | tttC | 495 |
| Human-Exon 46 | 7 | −1 | CAAAUAGUUUGAGAACUAUGUUGG | tttt | 496 |
| Human-Exon 46 | 8 | −1 | AAAUAGUUUGAGAACUAUGUUGGa | tttt | 497 |
| Human-Exon 46 | 9 | −1 | AUAGUUUGAGAACUAUGUUGGaaa | tttt | 498 |
| Human-Exon 46 | 10 | −1 | UAGUUUGAGAACUAUGUUGGaaaa | tttt | 499 |
| Human-Exon 46 | 11 | −1 | AGUUUGAGAACUAUGUUGGaaaaa | tttt | 500 |
| Human-Exon 46 | 12 | 1 | UAGUUCUCAAACUAUUUGUUAAUG | TTTG | 501 |
| Human-Exon 46 | 13 | 1 | UAuuuuuuuuuCCAACAUAGUUCU | TTTG | 502 |
| Human-Exon 46 | 14 | −1 | CUUCUUUCUCCAGGCUAGAAGAAC | TTTT | 503 |
| Human-Exon 46 | 15 | 1 | CUUCUAGCCUGGAGAAAGAAGAAU | TTTT | 504 |
| Human-Exon 46 | 16 | 1 | UCUUCUAGCCUGGAGAAAGAAGAA | TTTA | 505 |
| Human-Exon 46 | 17 | 1 | AUUCUUUUGUUCUUCUAGCCUGGA | TTTC | 506 |
| Human-Exon 46 | 18 | −1 | CAAAAGAAUAUCUUGUCAGAAUUU | TTTG | 507 |
| Human-Exon 46 | 19 | −1 | CUGGAAAAGAGCAGCAACUAAAAG | TTTT | 508 |
| Human-Exon 46 | 20 | −1 | CAAGUCAAGGUAAUUUUAUUUUCU | TTTG | 509 |
| Human-Exon 46 | 21 | −1 | CAAAUCCCCCAGGGCCUGCUUGCA | TTTA | 510 |
| Human-Exon 46 | 22 | 1 | AGGCCCUGGGGGAUUUGAGAAAAU | TTTT | 511 |
| Human-Exon 46 | 23 | 1 | CAGGCCCUGGGGGAUUUGAGAAAA | TTTA | 512 |
| Human-Exon 46 | 24 | 1 | CAAGCAGGCCCUGGGGGAUUUGAG | TTTT | 513 |
| Human-Exon 46 | 25 | 1 | GCAAGCAGGCCCUGGGGGAUUUGA | TTTC | 514 |
| Human-Exon 46 | 26 | 1 | GCAGAAAACCAAUGAUUGAAUUAA | TTTT | 515 |
| Human-Exon 46 | 27 | 1 | GGCAGAAAACCAAUGAUUGAAUUA | TTTT | 516 |
| Human-Exon 46 | 28 | 1 | GGGCAGAAAACCAAUGAUUGAAUU | TTTT | 517 |
| Human-Exon 46 | 29 | 1 | UGGGCAGAAAACCAAUGAUUGAAU | TTTA | 518 |
| Human-Exon 46 | 30 | −1 | AUUAGGUUAUUCAUAGUUCCUUGC | TTTA | 519 |
| Human-Exon 46 | 31 | 1 | AACUAUGAAUAACCUAAUGGGCAG | TTTT | 520 |
| Human-Exon 46 | 32 | 1 | GAACUAUGAAUAACCUAAUGGGCA | TTTC | 521 |
| Human-Exon 52 | 1 | −1 | UAUUUCCUGUUAAAUUGUUUUCUA | TTTA | 522 |
| Human-Exon 52 | 2 | 1 | GGUUUAUAGAAAACAAUUUAACAG | TTTC | 523 |
| Human-Exon 52 | 3 | −1 | AUACAGUAACAUCUUUUUUAUUUC | TTTA | 524 |
| Human-Exon 52 | 4 | −1 | UACAGUAACAUCUUUUUUAUUUCU | TTTT | 525 |
| Human-Exon 52 | 5 | 1 | AUGUUACUGUAUAAGGGUUUAUAG | TTTT | 526 |
| Human-Exon 52 | 6 | 1 | GAUGUUACUGUAUAAGGGUUUAUA | TTTC | 527 |
| Human-Exon 52 | 7 | 1 | CAGCCAAAACACUUUUAGAAAUAA | TTTT | 528 |
| Human-Exon 52 | 8 | 1 | CCAGCCAAAACACUUUUAGAAAUA | TTTT | 529 |
| Human-Exon 52 | 9 | 1 | ACCAGCCAAAACACUUUUAGAAAU | TTTT | 530 |
| Human-Exon 52 | 10 | 1 | GACCAGCCAAAACACUUUUAGAAA | TTTA | 531 |
| Human-Exon 52 | 11 | 1 | GUGAGACCAGCCAAAACACUUUUA | TTTC | 532 |
| Human-Exon 52 | 12 | −1 | AAUUGUACUUUACUUUGUAUUAUG | TTTA | 533 |
| Human-Exon 52 | 13 | −1 | AUUGUACUUUACUUUGUAUUAUGU | TTTT | 534 |
| Human-Exon 52 | 14 | 1 | UAAAGUACAAUUGUGAGACCAGCC | TTTT | 535 |
| Human-Exon 52 | 15 | 1 | GUAAAGUACAAUUGUGAGACCAGC | TTTG | 536 |
| Human-Exon 52 | 16 | 1 | GUAUUCCUUUUACAUAAUACAAAG | TTTA | 537 |
| Human-Exon 52 | 17 | 1 | GUUGUGUAUUCCUUUUACAUAAUA | TTTG | 538 |
| Human-Exon 52 | 18 | 1 | AUCCUGCAUUGUUGCCUGUAAGAA | TTTG | 539 |
| Human-Exon 52 | 19 | 1 | UUCCAACUGGGGACGCCUCUGUUC | TTTG | 540 |
| Human-Exon 52 | 20 | −1 | UUGGAAGAACUCAUUACCGCUGCC | TTTG | 541 |
| Human-Exon 52 | 21 | −1 | UCAUUACCGCUGCCCAAAAUUUGA | TTTT | 542 |
| Human-Exon 52 | 22 | 1 | CUCUUGAUUGCUGGUCUUGUUUUU | TTTG | 543 |
| Human-Exon 52 | 23 | −1 | GUUUUUUAACAAGCAUGGGACACA | TTTG | 544 |
| Human-Exon 52 | 24 | 1 | CUUUGUGUGUCCCAUGCUUGUUAA | TTTT | 545 |
| Human-Exon 52 | 25 | 1 | GCUUUGUGUGUCCCAUGCUUGUUA | TTTT | 546 |
| Human-Exon 52 | 26 | 1 | UGCUUUGUGUGUCCCAUGCUUGUU | TTTT | 547 |
| Human-Exon 52 | 27 | 1 | UUGCUUUGUGUGUCCCAUGCUUGU | TTTA | 548 |
| Human-Exon 52 | 28 | −1 | AGCAAGAUGCAUGACAAGUUUCAA | TTTA | 549 |
| Human-Exon 52 | 29 | −1 | GCAAGAUGCAUGACAAGUUUCAAU | TTTT | 550 |
| Human-Exon 52 | 30 | −1 | CAAGAUGCAUGACAAGUUUCAAUA | TTTT | 551 |
| Human-Exon 52 | 31 | 1 | GAUAUAUGAACUUAAGUUUUUAUU | TTTC | 552 |
| Human-Exon 50 | 1 | −1 | AUAGAAAUCCAAUAAUAUAUUCAC | TTTG | 553 |
| Human-Exon 50 | 2 | −1 | AUUAAGAUGUUCAUGAAUUAUCUU | TTTG | 554 |
| Human-Exon 50 | 3 | −1 | UAAGUAAUGUGUAUGCUUUUCUGU | TTTA | 555 |
| Human-Exon 50 | 4 | 1 | AUCUUCUAACUUCCUCUUUAACAG | TTTT | 556 |
| Human-Exon 50 | 5 | 1 | GAUCUUCUAACUUCCUCUUUAACA | TTTC | 557 |
| Human-Exon 50 | 6 | −1 | AUCUGAGCUCUGAGUGGAAGGCGG | TTTA | 558 |
| Human-Exon 50 | 7 | −1 | ACCGUUUACUUCAAGAGCUGAGGG | TTTG | 559 |
| Human-Exon 50 | 8 | 1 | CUGCUUUGCCCUCAGCUCUUGAAG | TTTA | 560 |
| Human-Exon 50 | 9 | −1 | UCUCUUUGGCUCUAGCUAUUUGUU | TTTG | 561 |
| Human-Exon 50 | 10 | −1 | CUCUUUGGCUCUAGCUAUUUGUUC | TTTT | 562 |
| Human-Exon 50 | 11 | 1 | CACUUUUGAACAAAUAGCUAGAGC | TTTG | 563 |
| Human-Exon 50 | 12 | 1 | UCACUUCAUAGUUGCACUUUUGAA | TTTG | 564 |
| Human-Exon 50 | 13 | −1 | AUGAAGUGAUGACUGGGUGAGAGA | TTTC | 565 |
| Human-Exon 50 | 14 | −1 | UGAAGUGAUGACUGGGUGAGAGAG | TTTT | 566 |
| Human-Exon 43 | 1 | 1 | AAGAGAAAAauauauauauauaua | TTTG | 567 |
| Human-Exon 43 | 2 | 1 | GAAUUAGCUGUCUAUAGAAAGAGA | tTTT | 568 |
| Human-Exon 43 | 3 | 1 | UGAAUUAGCUGUCUAUAGAAAGAG | TTTT | 569 |
| Human-Exon 43 | 4 | −1 | AGCUAAUUCAUUUUUUUACUGUUU | TTTA | 570 |
| Human-Exon 43 | 5 | 1 | AUGAAUUAGCUGUCUAUAGAAAGA | TTTC | 571 |
| Human-Exon 43 | 6 | −1 | GCUAAUUCAUUUUUUUACUGUUUU | TTTT | 572 |
| Human-Exon 43 | 7 | 1 | AAAAAAAUGAAUUAGCUGUCUAUA | TTTC | 573 |
| Human-Exon 43 | 8 | −1 | UUAAAAUUUUUAUAUUACAGAAUA | TTTA | 574 |
| Human-Exon 43 | 9 | −1 | UAAAAUUUUUAUAUUACAGAAUAU | TTTT | 575 |
| Human-Exon 43 | 10 | 1 | AUAUAAAAAUUUUAAAACAGUAAA | TTTT | 576 |
| Human-Exon 43 | 11 | 1 | AAUAUAAAAAUUUUAAAACAGUAA | TTTT | 577 |
| Human-Exon 43 | 12 | 1 | UAAUAUAAAAAUUUUAAAACAGUA | TTTT | 578 |
| Human-Exon 43 | 13 | 1 | GUAAUAUAAAAAUUUUAAAACAGU | TTTT | 579 |
| Human-Exon 43 | 14 | 1 | UGUAAUAUAAAAAUUUUAAAACAG | TTTA | 580 |
| Human-Exon 43 | 15 | 1 | UAUAUUCUGUAAUAUAAAAAUUUU | TTTT | 581 |
| Human-Exon 43 | 16 | 1 | UUAUAUUCUGUAAUAUAAAAAUUU | TTTA | 582 |
| Human-Exon 43 | 17 | −1 | CAGAAUAUAAAAGAUAGUCUACAA | TTTG | 583 |
| Human-Exon 43 | 18 | 1 | CUAUCUUUUAUAUUCUGUAAUAUA | TTTT | 584 |
| Human-Exon 43 | 19 | 1 | ACUAUCUUUUAUAUUCUGUAAUAU | TTTT | 585 |
| Human-Exon 43 | 20 | 1 | GACUAUCUUUUAUAUUCUGUAAUA | TTTA | 586 |
| Human-Exon 43 | 21 | −1 | CAUAGCAAGAAGACAGCAGCAUUG | TTTG | 587 |
| Human-Exon 43 | 22 | 1 | CAUUUUGUUAACUUUUUCCCAUUG | TTTC | 588 |
| Human-Exon 43 | 23 | −1 | CAUAUAUUUUUCUUGAUACUUGCA | TTTC | 589 |
| Human-Exon 43 | 24 | 1 | AAAUCAUUUCUGCAAGUAUCAAGA | TTTT | 590 |
| Human-Exon 43 | 25 | 1 | CAAAUCAUUUCUGCAAGUAUCAAG | TTTT | 591 |
| Human-Exon 43 | 26 | 1 | ACAAAUCAUUUCUGCAAGUAUCAA | TTTC | 592 |
| Human-Exon 43 | 27 | 1 | AUAAAUUCUACAGUUCCCUGAAAA | TTTG | 593 |
| Human-Exon 43 | 28 | −1 | GAAUUUAUUUCAGUACCCUCCAUG | TTTC | 594 |
| Human-Exon 43 | 29 | −1 | AAUUUAUUUCAGUACCCUCCAUGG | TTTT | 595 |
| Human-Exon 43 | 30 | 1 | UGAAAUAAAUUCUACAGUUCCCUG | TTTT | 596 |
| Human-Exon 43 | 31 | −1 | AUUUAUUUCAGUACCCUCCAUGGA | TTTT | 597 |
| Human-Exon 43 | 32 | 1 | CUGAAAUAAAUUCUACAGUUCCCU | TTTC | 598 |
| Human-Exon 43 | 33 | −1 | UUUAUUUCAGUACCCUCCAUGGAA | TTTT | 599 |
| Human-Exon 43 | 34 | −1 | UACCCUCCAUGGAAAAAAGACAGG | TTTC | 600 |
| Human-Exon 43 | 35 | −1 | ACCCUCCAUGGAAAAAAGACAGGG | TTTT | 601 |
| Human-Exon 43 | 36 | −1 | CCCUCCAUGGAAAAAAGACAGGGA | TTTT | 602 |
| Human-Exon 43 | 37 | 1 | UUUUUUCCAUGGAGGGUACUGAAA | TTTA | 603 |
| Human-Exon 43 | 38 | 1 | UGUCUUUUUUCCAUGGAGGGUACU | TTTC | 604 |
| Human-Exon 6 | 1 | 1 | CCUUGAGCAAGAACCAUGCAAACU | TTTA | 605 |
| Human-Exon 6 | 2 | −1 | UGCUCAAGGAAUGCAUUUUCUUAU | TTTC | 606 |
| Human-Exon 6 | 3 | −1 | GCUCAAGGAAUGCAUUUUCUUAUG | TTTT | 607 |
| Human-Exon 6 | 4 | 1 | UGCAUUCCUUGAGCAAGAACCAUG | TTTG | 608 |
| Human-Exon 6 | 5 | −1 | GAAAAUUUAUUUCCACAUGUAGGU | TTTG | 609 |
| Human-Exon 6 | 6 | −1 | AAAAUUUAUUUCCACAUGUAGGUC | TTTT | 610 |
| Human-Exon 6 | 7 | −1 | AAAUUUAUUUCCACAUGUAGGUCA | TTTT | 611 |
| Human-Exon 6 | 8 | 1 | CAUGUGGAAAUAAAUUUUCAUAAG | TTTT | 612 |
| Human-Exon 6 | 9 | 1 | ACAUGUGGAAAUAAAUUUUCAUAA | TTTC | 613 |
| Human-Exon 6 | 10 | −1 | CCACAUGUAGGUCAAAAAUGUAAU | TTTC | 614 |
| Human-Exon 6 | 11 | −1 | CACAUGUAGGUCAAAAAUGUAAUG | TTTT | 615 |
| Human-Exon 6 | 12 | −1 | ACAUGUAGGUCAAAAAUGUAAUGA | TTTT | 616 |
| Human-Exon 6 | 13 | 1 | ACAUUUUUGACCUACAUGUGGAAA | TTTA | 617 |
| Human-Exon 6 | 14 | 1 | CAUUACAUUUUUGACCUACAUGUG | TTTC | 618 |
| Human-Exon 6 | 15 | −1 | AAAAAUAUCAUGGCUGGAUUGCAA | TTTG | 619 |
| Human-Exon 6 | 16 | −1 | GCUGGAUUGCAACAAACCAACAGU | TTTC | 620 |
| Human-Exon 6 | 17 | −1 | CUGGAUUGCAACAAACCAACAGUG | TTTT | 621 |
| Human-Exon 6 | 18 | 1 | CCUAUGACUAUGGAUGAGAGCAUU | TTTG | 622 |
| Human-Exon 6 | 19 | −1 | UAGGUAAGAAGAUUACUGAGACAU | TTTA | 623 |
| Human-Exon 6 | 20 | −1 | AUUACUGAGACAUUAAAUAACUUG | TTTA | 624 |
| Human-Exon 6 | 21 | −1 | UUACUGAGACAUUAAAUAACUUGU | TTTT | 625 |
| Human-Exon 6 | 22 | 1 | GGGGAAAAAUAUGUCAUCAGAGUC | TTTA | 626 |
| Human-Exon 6 | 23 | 1 | CAUGAUCUGGAACCAUACUGGGGA | TTTT | 627 |
| Human-Exon 6 | 24 | 1 | ACAUGAUCUGGAACCAUACUGGGG | TTTT | 628 |
| Human-Exon 6 | 25 | 1 | GACAUGAUCUGGAACCAUACUGGG | TTTC | 629 |
| Human-Exon 7 | 1 | 1 | uacacacauacacaAAGACAAAUA | TTTA | 630 |
| Human-Exon 7 | 2 | 1 | uacacauacacacauacacaAAGA | TTTG | 631 |
| Human-Exon 7 | 3 | 1 | aacacauacacauacacacauaca | TTtg | 632 |
| Human-Exon 7 | 4 | 1 | AUUCCAGUCAAAUAGGUCUGGCCU | ttTT | 633 |
| Human-Exon 7 | 5 | 1 | UAUUCCAGUCAAAUAGGUCUGGCC | tTTA | 634 |
| Human-Exon 7 | 6 | 1 | GCUGGCAAACCACACUAUUCCAGU | TTTG | 635 |
| Human-Exon 7 | 7 | 1 | AGUCGUUGUGUGGCUGACUGCUGG | TTTG | 636 |
| Human-Exon 7 | 8 | −1 | CGCCAGAUAUCAAUUAGGCAUAGA | TTTC | 637 |
| Human-Exon 7 | 9 | −1 | AAACUACUCGAUCCUGAAGGUUGG | TTTA | 638 |
| Human-Exon 7 | 10 | 1 | CAUACUAAAAGCAGUGGUAGUCCA | TTTC | 639 |
| Human-Exon 7 | 11 | 1 | GAAAACAUUAAACUCUACCAUACU | TTTT | 640 |
| Human-Exon 7 | 12 | 1 | UGAAAACAUUAAACUCUACCAUAC | TTTA | 641 |
| Human-Exon 8 | 1 | −1 | UUGUUCAUUAUCCUUUUAGAGUCU | TTTG | 642 |
| Human-Exon 8 | 2 | 1 | AAAGGAUAAUGAACAAAUCAAAGU | TTTA | 643 |
| Human-Exon 8 | 3 | −1 | UAUCCUUUUAGAGUCUCAAAUAUA | TTTC | 644 |
| Human-Exon 8 | 4 | 1 | ACUCUAAAAGGAUAAUGAACAAAU | TTTG | 645 |
| Human-Exon 8 | 5 | −1 | UUUUAGAGUCUCAAAUAUAGAAAC | TTTG | 646 |
| Human-Exon 8 | 6 | −1 | UUUAGAGUCUCAAAUAUAGAAACC | TTTT | 647 |
| Human-Exon 8 | 7 | −1 | UUAGAGUCUCAAAUAUAGAAACCA | TTTT | 648 |
| Human-Exon 8 | 8 | 1 | UUGAGACUCUAAAAGGAUAAUGAA | TTTG | 649 |
| Human-Exon 8 | 9 | 1 | UUUGGUUUCUAUAUUUGAGACUCU | TTTT | 650 |
| Human-Exon 8 | 10 | 1 | UUUUGGUUUCUAUAUUUGAGACUC | TTTA | 651 |
| Human-Exon 8 | 11 | −1 | AGCAUUGAAGCCAUCCAGGAAGUG | TTTC | 652 |
| Human-Exon 8 | 12 | 1 | GCUUCAAUGCUCACUUGUUGAGGC | TTTT | 653 |
| Human-Exon 8 | 13 | 1 | GGCUUCAAUGCUCACUUGUUGAGG | TTTG | 654 |
| Human-Exon 8 | 14 | −1 | AGUGGAAAUGUUGCCAAGGCCACC | TTTA | 655 |
| Human-Exon 8 | 15 | −1 | GUUGCCAAGGCCACCUAAAGUGAC | TTTA | 656 |
| Human-Exon 8 | 16 | −1 | GAAGAACAUUUUCAGUUACAUCAU | TTTG | 657 |
| Human-Exon 8 | 17 | −1 | AUCAAAUGCACUAUUCUCAACAGG | TTTA | 658 |
| Human-Exon 8 | 18 | 1 | AUAGUGCAUUUGAUGAUGUAACUG | TTTT | 659 |
| Human-Exon 8 | 19 | 1 | AAUAGUGCAUUUGAUGAUGUAACU | TTTC | 660 |
| Human-Exon 8 | 20 | −1 | ACUAUUCUCAACAGGUAAAGUGUG | TTTA | 661 |
| Human-Exon 8 | 21 | 1 | UACCUAAAAAUGCAUAUAAAACAG | TTTT | 662 |
| Human-Exon 8 | 22 | 1 | AUACCUAAAAAUGCAUAUAAAACA | TTTC | 663 |
| Human-Exon 8 | 23 | 1 | CACGUAAUACCUAAAAAUGCAUAU | TTTT | 664 |
| Human-Exon 8 | 24 | 1 | GCACGUAAUACCUAAAAAUGCAUA | TTTA | 665 |
| Human-Exon 8 | 25 | 1 | auauauauGUGCACGUAAUACCUA | TTTT | 666 |
| Human-Exon 8 | 26 | 1 | uauauauauGUGCACGUAAUACCU | TTTT | 667 |
| Human-Exon 8 | 27 | 1 | auauauauauGUGCACGUAAUACC | TTTA | 668 |
| Human-Exon 55 | 1 | −1 | CUGCACAAUAUUAUAGUUGUUGCU | TTTA | 669 |
| Human-Exon 55 | 2 | 1 | AUAAAAAGAGAAAGAUGGAGGAAC | TTTA | 670 |
| Human-Exon 55 | 3 | 1 | CACCUAGUGAACUCCAUAAAAAGA | TTTC | 671 |
| Human-Exon 55 | 4 | 1 | AUGGUGCACCUAGUGAACUCCAUA | TTTT | 672 |
| Human-Exon 55 | 5 | 1 | AAUGGUGCACCUAGUGAACUCCAU | TTTT | 673 |
| Human-Exon 55 | 6 | 1 | GAAUGGUGCACCUAGUGAACUCCA | TTTA | 674 |
| Human-Exon 55 | 7 | 1 | GACCAAAUGUUCAGAUGCAAUUAU | TTTA | 675 |
| Human-Exon 55 | 8 | 1 | UCGCUCACUCACCCUGCAAAGGAC | TTTG | 676 |
| Human-Exon 55 | 9 | −1 | AGUGAGCGAGAGGCUGCUUUGGAA | TTTC | 677 |
| Human-Exon 55 | 10 | 1 | GCAGCCUCUCGCUCACUCACCCUG | TTTG | 678 |
| Human-Exon 55 | 11 | 1 | UUGCAGUAAUCUAUGAGUUUCUUC | TTTG | 679 |
| Human-Exon 55 | 12 | −1 | CUGCAACAGUUCCCCCUGGACCUG | TTTC | 680 |
| Human-Exon 55 | 13 | −1 | UGCAACAGUUCCCCCUGGACCUGG | TTTT | 681 |
| Human-Exon 55 | 14 | −1 | UUUCUUGCCUGGCUUACAGAAGCU | TTTC | 682 |
| Human-Exon 55 | 15 | 1 | UUUCAGCUUCUGUAAGCCAGGCAA | TTTC | 683 |
| Human-Exon 55 | 16 | −1 | GUCCUACAGGAUGCUACCCGUAAG | TTTC | 684 |
| Human-Exon 55 | 17 | −1 | GGCUCCUAGAAGACUCCAAGGGAG | TTTA | 685 |
| Human-Exon 55 | 18 | −1 | GCUCCUAGAAGACUCCAAGGGAGU | TTTT | 686 |
| Human-Exon 55 | 19 | −1 | CUCCAAGGGAGUAAAAGAGCUGAU | TTTC | 687 |
| Human-Exon 55 | 20 | 1 | UGGAUCCACAAGAGUGCUAAAGCG | TTTC | 688 |
| Human-Exon 55 | 21 | 1 | GUUCAAUUGGAUCCACAAGAGUGC | TTTA | 689 |
| Human-Exon 55 | 22 | −1 | UACUUGUAACUGACAAGCCAGGGA | TTTG | 690 |
| Human-Exon 55 | 23 | −1 | ACUUGUAACUGACAAGCCAGGGAC | TTTT | 691 |
| Human-Exon 55 | 24 | −1 | GUAACUGACAAGCCAGGGACAAAA | TTTG | 692 |
| Human-Exon 55 | 25 | −1 | UAACUGACAAGCCAGGGACAAAAC | TTTT | 693 |
| Human-Exon 55 | 26 | 1 | UCCCUGGCUUGUCAGUUACAAGUA | TTTG | 694 |
| Human-G1-exon51 | | 1 | CAGAGUAACAGUCUGAGUAGGAGc | TTTA | 695 |
| Human-G2-exon51 | | 1 | uacuuuguuuagcaauacauggua | TTTC | 696 |
| Human-G3-exon51 | | −1 | uggcucaaauuguuacucuucaau | TTTA | 697 |
| mouse-Exon23-G1 | | 1 | CUUUCAAagaacuuugcagagccu | TTTG | 698 |
| mouse-Exon23-G2 | | 1 | guugaaGCCAUUUUGUUGCUCUUU | TTTG | 699 |
| mouse-Exon23-G3 | | 1 | guugaaGCCAUUUUAUUGCUCUUU | TTTG | 700 |
| mouse-Exon23-G4 | | −1 | uuuugagGCUCUGCAAAGUUCUUU | TTTC | 701 |
| mouse-Exon23-G5 | | −1 | aguuauuaaugcauagauauucag | TTTA | 702 |
| mouse-Exon23-G6 | | −1 | uauaauaugcccuguaauauaaua | TTTC | 703 |
| mouse-Exon23-G7 | | 1 | uaaaggccaaaccucggcuuaccU | TTTC | 704 |
| mouse-Exon23-G8 | | 1 | ucaauaucuuugaaggacucuggg | TTTA | 705 |

*In this table, upper case letters represent sgRNA nucleotides that align to the exon sequence of the gene. Lower case letters represent sgRNA nucleotides that align to the intron sequence of the gene.

### VI. SEQUENCE TABLES

TABLE 8
Genomic target sites for sgRNA in mouse
Dmd Exon 51

| | | | SEQ ID | |
|---|---|---|---|---|
| ID sgRNA | Strand | Target site | NO: | PAM |
| Ex51-SA1 | 3′ | AGAGTAACAGTCTGACTGG | 706 | CAG |
| Ex51-SD | 5′ | GAAATGATCATCAAACAGA | 707 | AGG |
| Ex51-SA-2 | 3′ | CACTAGAGTAACAGTCTGAC | 708 | TGG |

TABLE 9
gRNA sequences targeting mouse Dmd Exon 51

| | | | SEQ ID | |
|---|---|---|---|---|
| ID sgRNA | Strand | Target site | NO: | PAM |
| Ex51-SA1 | 3′ | CCAGUCAGACUGUUACUCU | 709 | CAG |
| Ex51-SD | 5′ | UCUGUUUGAUGAUCAUUUC | 710 | AGG |
| Ex51-SA-2 | 3′ | GUCAGACUGUUACUCUAGUG | 711 | TGG |

TABLE 10
Genomic target sequences for sgRNAs targeting
human Dmd Exon 51

| | | | SEQ ID | |
|---|---|---|---|---|
| ID sgRNA | Strand | Target site | NO: | PAM |
| Ex51-SA | 3′ | AGAGTAACAGTCTGAGTAG | 712 | GAG |
| Ex51-SD | 5′ | GAGATGATCATCAAGCAGA | 713 | AGG |
| Ex51-SA-2 | 3′ | CACCAGAGTAACAGTCTGAG | 714 | TAG |

TABLE 11
sgRNA sequences targeting human Dmd Exon 51

| | | | SEQ ID | |
|---|---|---|---|---|
| ID sgRNA | Strand | Target site | NO: | PAM |
| Ex51-SA | 3′ | CUACUCAGACUGUUACUCU | 715 | GAG |
| Ex51-SD | 5′ | UCUGCUUGAUGAUCAUCUC | 716 | AGG |
| Ex51-SA-2 | 3′ | CUCAGACUGUUACUCUGGUG | 717 | TAG |

TABLE 12
Genomic target sequences for sgRNAs targeting
sites in various human Dmd Exons

| | | | SEQ ID | |
|---|---|---|---|---|
| ID sgRNA | Strand | Target site | NO: | PAM |
| Exon51-#1 | 3′ | CAGAGTAACAGTCTGAGTAG | 947 | GAG |
| Exon51-#2 | 3′ | CACCAGAGTAACAGTCTGAG | 718 | TAG |
| Exon51-#3 | 3′ | TATTTTGGGTTTTTGCAAAA | 719 | AGG |
| Exon51-#4 | 3′ | AGTAGGAGCTAAAATATTTT | 720 | GGG |
| Exon51-#5 | 3′ | GAGTAGGAGCTAAAATATTT | 721 | TGG |
| Exon51-#6 | 3′ | ACCAGAGTAACAGTCTGAGT | 722 | AGG |
| Exon51-#7 | 5′ | TCCTACTCAGACTGTTACTC | 723 | TGG |
| Exon51-#8 | 5′ | TACTCTGGTGACACAACCTG | 724 | TGG |
| Exon51-#9 | 3′ | GCAGTTTCCTTAGTAACCAC | 725 | AGG |
| Exon51-#10 | 5′ | GACACAACCTGTGGTTACTA | 726 | AGG |
| Exon51-#11 | 3′ | TGTCACCAGAGTAACAGTCT | 727 | GAG |
| Exon51-#12 | 3′ | AGGTTGTGTCACCAGAGTAA | 728 | CAG |
| Exon51-#13 | 3′ | AACCACAGGTTGTGTCACCA | 729 | GAG |
| Exon51-#14 | 3′ | GTAACCACAGGTTGTGTCAC | 730 | CAG |
| Exon53-#1 | 5′ | ATTTATTTTTCCTTTTATTC | 731 | TAG |
| Exon53-#2 | 5′ | TTTCCTTTTATTCTAGTTGA | 732 | AAG |
| Exon53-#3 | 3′ | TGATTCTGAATTCTTTCAAC | 733 | TAG |
| Exon53-#4 | 3′ | AATTCTTTCAACTAGAATAA | 734 | AAG |
| Exon53-#6 | 5′ | TTATTCTAGTTGAAAGAATT | 735 | CAG |
| Exon53-#7 | 5′ | TAGTTGAAAGAATTCAGAAT | 736 | CAG |
| Exon53-#8 | 5′ | AATTCAGAATCAGTGGGATG | 737 | AAG |
| Exon53-#9 | 3′ | ATTCTTTCAACTAGAATAAA | 738 | AGG |
| Exon53-#10 | 5′ | TTGAAAGAATTCAGAATCAG | 739 | TGG |
| Exon53-#11 | 5′ | TGAAAGAATTCAGAATCAGT | 740 | GGG |
| Exon53-#12 | 3′ | ACTGTTGCCTCCGGTTCTGA | 741 | AGG |
| Exon44-#1 | 3′ | CAGATCTGTCAAATCGCCTG | 742 | CAG |
| Exon44-#2 | 3′ | AAAACGCCGCCATTTCTCAA | 743 | CAG |
| Exon44-#3 | 3′ | AGATCTGTCAAATCGCCTGC | 744 | AGG |
| Exon44-#4 | 3′ | TATGGATCAAGAAAAATAGA | 745 | TGG |
| Exon44-#5 | 3′ | CGCCTGCAGGTAAAAGCATA | 746 | TGG |
| Exon44-#6 | 5′ | ATCCATATGCTTTTACCTGC | 747 | AGG |
| Exon44-#8 | 5′ | TTGACAGATCTGTTGAGAAA | 748 | TGG |
| Exon44-#9 | 5′ | ACAGATCTGTTGAGAAATGG | 749 | CGG |
| Exon44-#11 | 5′ | GGCGATTTGACAGATCTGTT | 750 | GAG |
| Exon44-#13 | 5′ | GGCGTTTTCATTATGATATA | 751 | AAG |
| Exon44-#14 | 5′ | ATGATATAAAGATATTTAAT | 752 | CAG |
| Exon44-#15 | 5′ | GATATTTAATCAGTGGCTAA | 753 | CAG |
| Exon44-#16 | 5′ | ATTTAATCAGTGGCTAACAG | 754 | AAG |
| Exon44-#17 | 3′ | AGAAACTGTTCAGCTTCTGT | 755 | TAG |
| Exon43-#1 | 5′ | GTTTTAAAATTTTTATATTA | 756 | CAG |
| Exon43-#2 | 5′ | TTTTATATTACAGAATATAA | 757 | AAG |
| Exon43-#3 | 5′ | ATATTACAGAATATAAAAGA | 758 | TAG |
| Exon45-#1 | 3′ | GTTCCTGTAAGATACCAAAA | 759 | AGG |
| Exon45-#2 | 5′ | TTGCCTTTTTGGTATCTTAC | 760 | AGG |
| Exon45-#3 | 5′ | TGGTATCTTACAGGAACTCC | 761 | AGG |
| Exon45-#4 | 5′ | ATCTTACAGGAACTCCAGGA | 762 | TGG |
| Exon45-#5 | 3′ | GCCGCTGCCCAATGCCATCC | 763 | TGG |
| Exon45-#6 | 5′ | CAGGAACTCCAGGATGGCAT | 764 | TGG |
| Exon45-#7 | 5′ | AGGAACTCCAGGATGGCATT | 765 | GGG |
| Exon45-#8 | 5′ | TCCAGGATGGCATTGGGCAG | 766 | CGG |
| Exon45-#9 | 5′ | GTCAGAACATTGAATGCAAC | 767 | TGG |
| Exon45-#10 | 3′ | AGTTCCTGTAAGATACCAAA | 768 | AAG |
| Exon45-#11 | 3′ | TGCCATCCTGGAGTTCCTGT | 769 | AAG |
| Exon45-#12 | 5′ | TTGGTATCTTACAGGAACTC | 770 | CAG |
| Exon45-#13 | 3′ | CGCTGCCCAATGCCATCCTG | 771 | GAG |
| Exon45-#14 | 5′ | AACTCCAGGATGGCATTGGG | 772 | CAG |
| Exon45-#15 | 5′ | GGGCAGCGGCAAACTGTTGT | 773 | CAG |
| Exon52-#1 | 3′ | AGATCTGTCAAATCGCCTGC | 774 | AGG |
| Exon52-#2 | 3′ | AATCCTGCATTGTTGCCTGT | 775 | AAG |
| Exon52-#3 | 5′ | CGCTGAAGAACCCTGATACT | 776 | AAG |
| Exon52-#4 | 3′ | GAACAAATATCCCTTAGTAT | 777 | CAG |
| Exon52-#5 | 3′ | CTGTAAGAACAAATATCCCT | 778 | TAG |
| Exon52-#6 | 5′ | CTAAGGGATATTTGTTCTTA | 779 | CAG |
| Exon52-#8 | 5′ | TGTTCTTACAGGCAACAATG | 780 | CAG |
| Exon52-#9 | 5′ | CAACAATGCAGGATTTGGAA | 781 | CAG |
| Exon52-#10 | 5′ | ACAATGCAGGATTTGGAACA | 782 | GAG |
| Exon52-#11 | 5′ | ATTTGGAACAGAGGCGTCCC | 783 | CAG |
| Exon52-#12 | 5′ | ACAGAGGCGTCCCCAGTTGG | 784 | AAG |
| Exon2-#1 | 5′ | TATTTTTTTATTTTGCATTT | 785 | TAG |
| Exon2-#2 | 5′ | TTATTTTGCATTTTAGATGA | 786 | AAG |
| Exon2-#3 | 5′ | ATTTTGCATTTTAGATGAAA | 787 | GAG |
| Exon2-#4 | 5′ | TTGCATTTTAGATGAAAGAG | 788 | AAG |
| Exon2-#5 | 5′ | ATGAAAGAGAAGATGTTCAA | 789 | AAG |

TABLE 13
gRNA sequences for targeting sites in various
human Dmd Exons

| | | | SEQ ID | |
|---|---|---|---|---|
| ID sgRNA | Strand | Target site | NO: | PAM |
| Exon51-#1 | 3′ | CUACUCAGACUGUUACUCUG | 790 | GAG |
| Exon51-#2 | 3′ | CUCAGACUGUUACUCUGGUG | 791 | TAG |
| Exon51-#3 | 3′ | UUUUGCAAAAACCCAAAAUA | 792 | AGG |
| Exon51-#4 | 3′ | AAAAUAUUUUAGCUCCUACU | 793 | GGG |
| Exon51-#5 | 3′ | AAAUAUUUUAGCUCCUACUC | 794 | TGG |
| Exon51-#6 | 3′ | ACUCAGACUGUUACUCUGGU | 795 | AGG |
| Exon51-#7 | 5′ | GAGUAACAGUCUGAGUAGGA | 796 | TGG |
| Exon51-#8 | 5′ | CAGGUUGUGUCACCAGAGUA | 797 | TGG |
| Exon51-#9 | 3′ | GUGGUUACUAAGGAAACUGC | 798 | AGG |
| Exon51-#10 | 5′ | UAGUAACCACAGGUUGUGUC | 799 | AGG |
| Exon51-#11 | 3′ | AGACUGUUACUCUGGUGACA | 800 | GAG |
| Exon51-#12 | 3′ | UUACUCUGGUGACACAACCU | 801 | CAG |
| Exon51-#13 | 3′ | UGGUGACACAACCUGUGGUU | 802 | GAG |
| Exon51-#14 | 3′ | GUGACACAACCUGUGGUUAC | 803 | CAG |
| Exon53-#1 | 5′ | GAAUAAAAGGAAAAAUAAAU | 804 | TAG |
| Exon53-#2 | 5′ | UCAACUAGAAUAAAAGGAAA | 805 | AAG |
| Exon53-#3 | 3′ | GUUGAAAGAAUUCAGAAUCA | 806 | TAG |
| Exon53-#4 | 3′ | UUAUUCUAGUUGAAAGAAUU | 807 | AAG |
| Exon53-#6 | 5′ | AAUUCUUUCAACUAGAAUAA | 808 | CAG |
| Exon53-#7 | 5′ | AUUCUGAAUUCUUUCAACUA | 809 | CAG |
| Exon53-#8 | 5′ | CAUCCCACUGAUUCUGAAUU | 810 | AAG |
| Exon53-#9 | 3′ | UUUAUUCUAGUUGAAAGAAU | 811 | AGG |
| Exon53-#10 | 5′ | CUGAUUCUGAAUUCUUUCAA | 812 | TGG |
| Exon53-#11 | 5′ | ACUGAUUCUGAAUUCUUUCA | 813 | GGG |
| Exon53-#12 | 3′ | UCAGAACCGGAGGCAACAGU | 814 | AGG |
| Exon44-#1 | 3′ | CAGGCGAUUUGACAGAUCUG | 815 | CAG |
| Exon44-#2 | 3′ | UUGAGAAAUGGCGGCGUUUU | 816 | CAG |
| Exon44-#3 | 3′ | GCAGGCGAUUUGACAGAUCU | 817 | AGG |
| Exon44-#4 | 3′ | UCUAUUUUUCUUGAUCCAUA | 818 | TGG |
| Exon44-#5 | 3′ | UAUGCUUUUACCUGCAGGCG | 819 | TGG |
| Exon44-#6 | 5′ | GCAGGUAAAAGCAUAUGGAU | 820 | AGG |
| Exon44-#8 | 5′ | UUUCUCAACAGAUCUGUCAA | 821 | TGG |
| Exon44-#9 | 5′ | CCAUUUCUCAACAGAUCUGU | 822 | CGG |
| Exon44-#11 | 5′ | AACAGAUCUGUCAAAUCGCC | 823 | GAG |
| Exon44-#13 | 5′ | UAUAUCAUAAUGAAAACGCC | 824 | AAG |
| Exon44-#14 | 5′ | AUUAAAUAUCUUUAUAUCAU | 825 | CAG |
| Exon44-#15 | 5′ | UUAGCCACUGAUUAAAUAUC | 826 | CAG |
| Exon44-#16 | 5′ | CUGUUAGCCACUGAUUAAAU | 827 | AAG |
| Exon44-#17 | 3′ | ACAGAAGCUGAACAGUUUCU | 828 | TAG |
| Exon43-#1 | 5′ | UAAUAUAAAAAUUUUAAAAC | 829 | CAG |
| Exon43-#2 | 5′ | UUAUAUUCUGUAAUAUAAAA | 830 | AAG |
| Exon43-#3 | 5′ | UCUUUUAUAUUCUGUAAUAU | 831 | TAG |
| Exon45-#1 | 3′ | UUUUGGUAUCUUACAGGAAC | 832 | AGG |
| Exon45-#2 | 5′ | GUAAGAUACCAAAAAGGCAA | 833 | AGG |
| Exon45-#3 | 5′ | GGAGUUCCUGUAAGAUACCA | 834 | AGG |
| Exon45-#4 | 5′ | UCCUGGAGUUCCUGUAAGAU | 835 | TGG |
| Exon45-#5 | 3′ | GGAUGGCAUUGGGCAGCGGC | 836 | TGG |
| Exon45-#6 | 5′ | AUGCCAUCCUGGAGUUCCUG | 837 | TGG |
| Exon45-#7 | 5′ | AAUGCCAUCCUGGAGUUCCU | 838 | GGG |
| Exon45-#8 | 5′ | CUGCCCAAUGCCAUCCUGGA | 839 | CGG |
| Exon45-#9 | 5′ | GUUGCAUUCAAUGUUCUGAC | 840 | TGG |
| Exon45-#10 | 3′ | UUUGGUAUCUUACAGGAACU | 841 | AAG |
| Exon45-#11 | 3′ | ACAGGAACUCCAGGAUGGCA | 842 | AAG |
| Exon45-#12 | 5′ | GAGUUCCUGUAAGAUACCAA | 843 | CAG |
| Exon45-#13 | 3′ | CAGGAUGGCAUUGGGCAGCG | 844 | GAG |
| Exon45-#14 | 5′ | CCCAAUGCCAUCCUGGAGUU | 845 | CAG |
| Exon45-#15 | 5′ | ACAACAGUUUGCCGCUGCCC | 846 | CAG |
| Exon52-#1 | 3′ | GCAGGCGAUUUGACAGAUCU | 847 | AGG |
| Exon52-#2 | 3′ | ACAGGCAACAAUGCAGGAUU | 848 | AAG |
| Exon52-#3 | 5′ | AGUAUCAGGGUUCUUCAGCG | 849 | AAG |
| Exon52-#4 | 3′ | AUACUAAGGGAUAUUUGUUC | 850 | CAG |
| Exon52-#5 | 3′ | AGGGAUAUUUGUUCUUACAG | 851 | TAG |
| Exon52-#6 | 5′ | UAAGAACAAAUAUCCCUUAG | 852 | CAG |
| Exon52-#8 | 5′ | CAUUGUUGCCUGUAAGAACA | 853 | CAG |
| Exon52-#9 | 5′ | UUCCAAAUCCUGCAUUGUUG | 854 | CAG |
| Exon52-#10 | 5′ | UGUUCCAAAUCCUGCAUUGU | 855 | GAG |
| Exon52-#11 | 5′ | GGGACGCCUCUGUUCCAAAU | 856 | CAG |
| Exon52-#12 | 5′ | CCAACUGGGGACGCCUCUGU | 857 | AAG |
| Exon2-#1 | 5′ | ACAGAGGCGUCCCCAGUUGG | 858 | TAG |
| Exon2-#2 | 5′ | UCAUCUAAAAUGCAAAAUAA | 859 | AAG |
| Exon2-#3 | 5′ | UUUCAUCUAAAAUGCAAAAU | 860 | GAG |
| Exon2-#4 | 5′ | CUCUUUCAUCUAAAAUGCAA | 861 | AAG |
| Exon2-#5 | 5′ | UUGAACAUCUUCUCUUUCAU | 862 | AAG |

TABLE 14
Genomic targeting sequence for sgRNAs
targeting dog Dmd Exon 51

| | | | SEQ ID | |
|---|---|---|---|---|
| ID sgRNA | Strand | Target site | NO: | PAM |
| Ex51-SA-2 | 3′ | CACCAGAGTAACAGTCTGAC | 863 | TGG |

TABLE 15
gRNA sequence for targeting dog Dmd Exon 51

| | | | SEQ ID | |
|---|---|---|---|---|
| ID sgRNA | Strand | Target site | NO: | PAM |
| Ex51-SA-2 | 3′ | GUCAGACUGUUACUCUGGUG | 864 | TGG |

### VII. EXAMPLES

[0353] The following examples are included to demonstrate preferred embodiments of the disclosure. It should be appreciated by those of skill in the art that the techniques disclosed in the examples which follow represent techniques discovered by the inventor to function well in the practice of the disclosure, and thus can be considered to constitute preferred modes for its practice. However, those of skill in the art should, in light of the present disclosure, appreciate that many changes can be made in the specific embodiments which are disclosed and still obtain a like or similar result without departing from the spirit and scope of the disclosure.

### Example 1

### Materials and Methods

[0354] Study Approval. All experimental procedures involving animals in this study were reviewed and approved by the University of Texas Southwestern Medical Center's Institutional Animal Care and Use Committee.

[0355] CRISPR/Cas9-mediated exon 50 deletion in mice. Two single-guide RNA (sgRNA) specific intronic region surrounding exon 50 sequence of the mouse Dmd locus were cloned into vector px330 using the following primers: Dmd exon 50_F1: 5′-CACCGAAATGATGAGTGAAGTTATAT-3′ (SEQ ID NO: 926); Dmd exon 50_R1: 5′-AAACATATAACTTCACTCATCATTTC-3′ (SEQ ID NO: 927); Dmd exon 50_F2: 5′ CACCGGTTTGTTCAAAAGCGTGGCT-3′ (SEQ ID NO: 928); Dmd exon 50_R2: 5′-AAACAGCCACGCTTTTGAACAAAC-3′ (SEQ ID NO: 929).

[0356] For the in vitro transcription of sgRNA, T7 promoter sequence was added to the sgRNA template by PCR using the following primers: Dmd exon 50_T7-F1: GAATTGTAATACGACTCACTATAGGAATGATGAGTGAAGTTATAT (SEQ ID NO: 930); Dmd exon 50_T7-F2:

[0357] GAATTGTAATACGACTCACTATAGGGTTTGTTCAAAAGCGTGGCT (SEQ ID NO: 931); Dmd exon 50_T7-Rv: AAAAGCACCGACTCGGTGCCAC (SEQ ID NO: 932).

[0358] The gel purified PCR products were used as template for in vitro transcription using the MEGAshortscript T7 Kit (Life Technologies). sgRNA were purified by MEGAclear kit (Life Technologies) and eluted with nuclease-free water (Ambion). The concentration of guide RNA was measured by a NanoDrop instrument (Thermo Scientific).

[0359] Genotyping of ΔEx50 Mice. ΔEx50 mice were genotyped using primers encompassing the targeted region: Geno50-F: 5′-GGATTGACTGAAATGATGGCCAAGG-3′ (SEQ ID NO: 937); Geno50-R: 5′-CTGCCACGATTACTCTGCTTCCAG-3′ (SEQ ID NO: 938). Tail biopsies were digested in 100 μL of 25-mM NaOH, 0.2-mM EDTA (pH 12) for 20 min at 95° C. Tails were briefly centrifuged followed by addition of 100 μL of 40-mM TrisHCl (pH 5) and mixed to homogenize. Two microliters of this reaction was used for subsequent PCR reactions with the primers below, followed by gel electrophoresis.

[0360] Plasmids. The pSpCas9(BB)-2A-GFP (PX458) plasmid containing the human codon optimized SpCas9 gene with 2A-EGFP and the backbone of sgRNA was purchased from Addgene (Plasmid #48138). AAV TRIPSR plasmids were obtained from Dr. Dirk Grimm (Heidelberg University Hospital). Cloning of sgRNA was done using a Bbsl site. pGL3-CK8e plasmid was obtained from Dr. Stephen Hauschka (Department of Biochemistry, University of Washington, Seattle, USA). AAV-miniCMV-Cas9-shortPolyA plasmid was obtained from Dr. Dirk Grimm (Heidelberg University Hospital). To generate the final AAV9-CK8-CRISPR/Cas9 vector used in this manuscript, AAV-miniCMV-Cas9-short-PolyA was digested with PacI and NheI enzyme to remove the miniCMV promoter. CK8 promoter was amplified from pGL3-CK8e plasmid using primers containing PacI and NheI site sequence and cloned into digested vector to generate AAV-CK8-Cas9-shortPolyA plasmid.

[0361] sgRNA Identification and Cloning for skipping exon 51. Dmd exon 51 guide RNAs were defined using crispr.mit.edu. Guide sequences were cloned into Addgene plasmid #42230 (6), a gift from Feng Zhang, using the following primers: Dmd exon 51_F1: 5′-CACCGAGAGTAACAGTCTGACTGG-3′ (SEQ ID NO: 942); Dmd exon 51_R1: 5′-AAACGTCAGACTGTTACTCTAGTGC-3′ (SEQ ID NO: 943); Dmd exon 51_F2: 5′-CACCGCACTAGAGTAACAGTCTGAC-3′ (SEQ ID NO: 944); Dmd exon 51_R2: 5′-AAACCCAGTCAGACTGTTACTCTC-3′ (SEQ ID NO: 945). Guide sequences were tested in culture using 10T1/2 cells before cloning into the AAV backbone.

[0362] Triplicate sgRNA assembly in AAV backbone using Golden Gate system. The assembly of the AAV TRISPR backbone cloning system relies on two consecutive steps of Golden Gate Assembly. First step assembly of gRNA into donor plasmid. Annealing of oligonucleotides is performed by heating a reaction containing 2.5 μl of each oligo (0.5 μM), 5 μl NEBuffer 2 (NEB) and 40 μL ddH₂O to 95° C. for 5 minutes using heating block. For the assembly reaction into donor plasmid mix 40 fmol (˜100 ng) destination backbone, 1 μL annealed, diluted oligos, 0.75 μL of Esp3I, 1 μL buffer tango (both Thermo Scientific), 1 μL of T4 DNA Ligase (400 U/μL) (NEB) as well as ATP and DTT at a final concentration of 1 mM in 10 μL total volume. Using a thermocycler, conduct 25 to 50 cycles of 37° C/3 min followed by 20° C./5 minutes. Denature restriction enzyme and ligase by heating to 80° C. for 20 minutes. Use 3 μL of this reaction for transformation of chemo-competent bacteria, recover in SOC (37° C., 800 rpm, 40 min) and spread on LB-Agar plates containing chloramphenicol (25 μg/mL). Annealed oligonucleotides encoding for the sgRNA are cloned into donor plasmids that carry the negative selection marker ccdB (to reduce background during cloning) as well as the chloramphenicol resistance gene. To test the correct assembly the plasmid are sequenced using the primer Dono-R-5′-GTATGTTGTGTGGAATTGTGAG-3′ (SEQ ID NO: 948). Second step is that three of these donor plasmids driving expression of one sgRNA under transcriptional control of U6, H1 or 7SK promoter are pooled in a second Golden Gate assembly along with a recipient plasmid that carries AAV ITRs. The assembly reaction will contain all four plasmids: donor plasmid-#1-U6-sgRNA, donor plasmid-#2-H1-sgRNA, donor plasmid-#3-7SK-sgRNA and recipient plasmid containing the ITR. Digest with BbsI will generate unique overhangs for each fragment (U6, H1, 7SK, recipient backbone). During the ligation procedure, these overhangs anneal a circularized plasmid is only obtained, when the three cassettes match each other.

[0363] Serum creatine kinase (CK) measurement. Mouse serum CK was measured by the Metabolic Phenotyping Core at UT Southwestern Medical Center. Blood was collected from the submandibular vein and serum CK level was measured by VITROS Chemistry 7 Products

[0364] CK Slides to quantitatively measure CK activity using VITROS 250 Chemistry System.

[0365] In vivo canine studies. Intra-muscular (IM) injections were performed in 1 month old 4E50 MD dogs under ventilated general anaesthesia. One single injection was performed at 4 different sites of the left cranial tibialis muscle. All dogs received premedication of an opiate (buprenorphine), perioperative antibiosis and 4 days of postoperative analgesia (carprofen). Two affected dogs received rAAV-mixed with myoediting components, AAV-Cas9 and AAV-sgRNA-ex51, which were prepared in lactated Ringer's solution to a final concentration of 1E13vg per injected muscle.

### Example 2

### Results

[0366] A humanized model of DMD. The most common hot spot mutation region in DMD patients is the region between exon 45 to 51, and skipping of exon 51 could be used to treat the largest group (13-14%) of patients. To investigate CRISPR/Cas9-mediated exon 51 skipping in vivo, the inventors generated a mouse model that mimics the human “hot spot” region by deleting exon 50 using the CRISPR/Cas9 system directed by 2 sgRNAs (FIG. 1A). The deletion of exon 50 was confirmed by DNA sequencing (FIG. 1B). Deletion of exon 50 placed the dystrophin gene out of frame leading to the absence of dystrophin protein in skeletal muscle and heart (FIGS. 1C-E). Mice lacking exon 50 showed pronounced dystrophic muscle changes by 2 months of age (FIG. 1E). Serum analysis of delta-exon 50 mice showed a significant increase in creatine kinase (CK) levels, indicative of muscle damage (FIG. 1F). Taken together, dystrophin protein expression, muscle histology and serum CK levels validated the dystrophic phenotype of the ΔEx50 mouse model.

[0367] Restoration of dystrophin expression using a single cut strategy to skip exon 51. S. pyogenes Cas9 requires NAG/NGG as a PAM sequence to generate a double-strand DNA break. Interestingly, the universal splice acceptor and donor sites of exons contain NAG or NGG (FIG. 3B). Therefore, to correct the reading frame and dystrophin expression in the ΔEx50 mouse model, the inventors generated sgRNA that targeted splice acceptor and donor sites of exon 51 to delete it, thereby recreating the in-frame dystrophin protein. To test whether the sgRNA guides were able to efficiently cut, the inventors first evaluated their effectiveness in mouse and human cell lines (FIG. 5). To determine the most efficient way to correct the DMD reading frame, the inventors compared 2 different strategies: (1) double-guide strategy in which one copy of a first sgRNA targeting splice acceptor site (sgRNA-SA) and one copy of a second sgRNA targeting donor acceptor site (sgRNA-SD), were cloned into the rAAV9-sgRNA vector; (2) triplicate strategy in which the inventors cloned 3 copies of the same sgRNA (sgRNA-SA) into the rAAV9-sgRNA vector (FIG. 3C). Expression of each copy of sgRNA-SA was driven by a different RNA promoter (U6, H1 and 7SK). The inventors generated AAV-Cas9 using an AAV-Cas9 vector (CK8-Cas9-shortPolyA), which employs a CK8 promoter to drive expression of the humanized SpCas9 specifically in skeletal muscle and heart tissues. Following intra-muscular (IM) injection of P12 mice with AAVs, muscle tissues were analyzed. RT-PCR of RNA from ΔEx50 mice injected with AAV-Tri-SA and AAV-SA+SD showed that deletion of exon 51 (ΔEx50-51) allowed splicing from exon 49 to 52 (FIG. 2A, lower band). Sequencing of RT-PCR products of the ΔEx50-51 band confirmed that exon 49 spliced to exon 52 (FIG. 2B). Unexpectedly, the RT-PCR analysis showed that a single cut strategy using a triplicate version of sgRNA-SA (AAV-Tri-SA) is as efficient as using two sgRNAs-sgRNA-SA and sgRNA-SD (AAV-SA+SD).

[0368] To further assess the efficiency of the AAV-Tri-SA editing strategy, the inventors performed histological analysis of injected muscle to evaluate the number of fibers that express dystrophin throughout entire muscle sections. Interestingly, dystrophin immunostaining of muscle cryosections from ΔEx50 mice injected with AAV-Tri-SA revealed significantly higher numbers of dystrophin-positive fibers (average of 43±0.9%) compared to the muscle from ΔEx50 mice injected with AAV-SA+SD (average of 31±0.1%) (FIGS. 3D-E, FIG. 6). Western blot analysis confirmed the restoration of dystrophin expression in skeletal muscle. (FIGS. 3F-G). Hematoxylin and eosin (H&E) staining of muscle showed that histopathologic hallmarks of muscular dystrophy, such as necrotic myofibers, were diminished in TA muscle at 3-weeks post-AAV delivery (FIG. 4A). Quantitative analysis of the distribution of myofiber areas showed a clear increase in fiber size for both AAV-Tri-SA and AAV-SA-SD treated muscles compared to ΔEx50 muscles (FIG. 4B). However, AAV-Tri-SA treated muscles revealed a higher decrease in the frequency of small fibers (<500 μm) compared to AAV-SA+SD treated muscles. Together, these results demonstrate that targeting the splice acceptor site of exon 51 with one single cut using AAV-Tri-SA is highly efficient in restoring dystrophin expression in DMD. This approach has usefulness for many disorders that can be corrected by exon skipping.

[0369] Tailoring of the single DNA cut genome editing strategy. S. pyogenes Cas9 guided by sgRNAs binds to the targeted genomic locus next to a PAM and generates a double-strand DNA break (DSB) 3 nucleotides preceding the PAM sequence. To further assess the efficiency of the method by targeting the splice acceptor site, the inventors designed a second sgRNA triple guide construct (sgRNA-ex51-SA2), targeting a region adjacent to the exon 51 splice acceptor site. This gRNA uses a PAM sequence 3 nucleotides further into the exon in order to generate the DSB close to the splice acceptor site for exon 51 (FIG. 7A-FIG. 7B). Cutting in the vicinity of the splice acceptor region and within the exon sequence resulted in reframing events and exon skipping events. Moreover, designing the sgRNA in the exon sequence that shows higher conservation than intron sequence across species facilitates translation of the sgRNA to other species.

[0370] The DNA cutting activity of Cas9 coupled with sgRNA-ex51-SA2 was evaluated in 10T1/2 mouse fibroblasts using the mismatch-specific T7 endonuclease I (T7E1) assay (FIG. 8A). To investigate the type of mutations generated by Cas9 coupled with sgRNA-51-SA2, genomic deep-sequencing analysis was performed. The sequencing analysis revealed that 9.3% of mutations contained a single adenosine (A) insertion located 3 nucleotides 3′ of the PAM sequence. In addition, 7.3% of mutations contained deletions covering the splice acceptor site and a highly-predicted exonic splicing enhancer site for exon 51 (FIG. 8B). The sgRNA-ex51-SA2 corresponds to a highly conserved region of the Dmd gene (FIGS. 8C-D), and the inventors tested the ability of Cas9 and human sgRNA-51 to cut the human Dmd locus in 293T cells. The T7E1 assay revealed clear cleavage at the predicted site (FIG. 8E). Similarly, sequence analysis revealed that Cas9 coupled with human sgRNA-ex51-SA2 generated the same adenosine (A) insertion and a different range of deletions around the cleavage site (FIG. 8F).

[0371] For the in vivo delivery of Cas9 and sgRNA-ex51-SA2 to skeletal muscle and heart tissue, adeno-associated virus 9 (AAV9) was used, which displays preferential tropism for these tissues. To further enhance muscle-specific expression, an AAV9-Cas9 vector (CK8e-Cas9-shortPolyA) was employed, which contains a muscle-specific CK regulatory cassette, referred to as the CK8e promoter, which is highly specific for expression in muscle and heart (FIG. 9A). Together, this 436 bp muscle-specific cassette and the 4101 bp Cas9 cDNA are within the packaging limit of AAV9. Expression of each sgRNA was driven by one of three RNA polymerase III promoters (U6, H1 and 7SK) (FIG. 9B).

[0372] Correction of the dystrophin reading frame in ΔEx50 mice by a single DNA cut. The sgRNA-ex51-SA2 was delivered to mice in triple copy (AAV-Tri-SA2), along with a Cas9 (AAV-Cas9), by intra-muscular (IM) injection. Following the injection, muscle tissues were analyzed. In vivo targeting efficiency was estimated by RT-PCR with primers for sequences in exons 48 and 53 and the T7E1 assay for the targeted genomic regions. To investigate whether efficient target cleavage was achieved, the inventors amplified a 771 bp region spanning the target site and analyzed it using the T7EI assay (FIG. 10A). The activity of SpCas9 with the corresponding sgRNA was analyzed on the target site. T7EI assays revealed mutagenesis of the Dmd locus after delivery of AAV-Cas9 and AAV9-sgRNA-51-SA2 (FIG. 10A). To investigate the type of mutations generated in ΔEx50 mice injected with Cas9 and sgRNA-expressing AAV9s, genomic PCR amplification products spanning the target site were analyzed by amplicon deep-sequencing analysis. Deep sequencing of the targeted region indicated that 27.9% of total reads contained changes at the targeted genomic site (FIG. 10B). On average, 15% of the identified mutations contained the same A insertion seen in mouse 10T1/2 and human 293 cells in vitro. The deletions identified using this method encompassed a highly-predicted exonic splicing enhancer site for exon 51 (FIG. 10B).

[0373] RT-PCR products of RNA from muscle of ΔEx50 mice injected intramuscularly with AAV9-Cas9 and AAV9-sgRNA-51 showed that deletion of exon 51 (ΔEx50-51) allowed splicing from exon 49 to 52 (FIG. 11A, lower band). By sequencing RT-PCR products of the ΔEx50-51 band, it was confirmed that exon 49 was spliced to exon 52. To further define the mutations introduced by our gene editing strategy, RT-PCR amplification products from 4 samples were directly subjected to topoisomerase-based thymidine to adenosine (TOPO-TA) cloning without gel purification, then sequenced. Surprisingly, sequence analysis of 40 clones from each sample showed that in addition to exon 51-skipped cDNA products (ΔEx50-51) identified in 15% of sequenced clones, ΔEx50 mice injected with AAV9-Cas9 and AAV9-sgRNA-51 showed a high frequency of reframing events. Of sequenced clones, 63% contained a single nucleotide insertion in the sequence of exon 51 (FIGS. 11 B-C). The most dominant insertion mutation seen was an A insertion.

[0374] On gels, the A insertion was indistinguishable in size from non-edited cDNA products, so deep-sequencing analysis was performed to determine the abundance of this insertion compared to other small insertions. Deep-sequencing of the upper band containing the non-edited cDNA product and reframed cDNA products indicated that 69.22% of total reads contained reframed cDNA products with an A insertion, 17.71% contained non-edited cDNA product, and the rest contained small deletions and insertions (FIG. 11D). The deep-sequencing analysis of uninjected ΔEx50 mice confirmed that the A insertion is a result of Cas9-generated editing. These amplicon deep-sequencing results confirmed the results from TOPO-TA cloning and sequencing. Taken together, RT-PCR analysis revealed that ΔEx50 mice injected with AAV9-Cas9 and AAV9-sgRNA-51-SA2 showed a high frequency of reframing events with cDNA products containing an A insertion in the sequence of exon 51 in addition to exon 51 skipping events resulting from deletion in a highly conserved exonic splicing enhancer region.

[0375] Restoration of dystrophin expression after intramuscular AAV9 delivery of Cas9 and sgRNA-51-SA2. Remarkably, dystrophin immunostaining of muscle cryosections from ΔEx50 mice injected with AAV-Tri-SA2 revealed significantly higher numbers of dystrophin-positive fibers with an average of 99% restoration of normal fibers (FIG. 12A, FIG. 13). Western blot analysis confirmed the restoration of dystrophin expression in skeletal muscle. (FIG. 12C, FIG. 12D). Hematoxylin and eosin (H&E) staining of muscle showed that histopathologic hallmarks of muscular dystrophy, such as necrotic myofibers, were corrected in TA muscle at 3-weeks post-AAV delivery (FIG. 12B and FIG. 14). This method, using a distinct sgRNA design, represents a major advance in efficiency of DMD correction with direct applicability to the patients with the most common dystrophin mutations.

[0376] Rescue of dystrophin expression following intramuscular injections of AAV9-Cas9 combined with different AAV9s expressing single copy or triple copy of sgRNA. To evaluate the benefit of triple promoter expression of sgRNA-ex51-SA2 in vivo, different constructs were investigated, where sgRNA expression was driven by a single RNA polymerase III promoter (U6 or H1 or 7SK) and, separately, by three RNA polymerase III promoters (U6, H1 and 7SK) (FIG. 15A). The inventors delivered the sgRNA-ex51-SA2 in single copy driven separately by the U6 promoter (AAV9-U6-sgRNA-51-SA2), the H1 promoter (AAV9-H1-sgRNA-51-SA2), the 7SK promoter (AAV9-7SK-sgRNA-51-SA2) and triple copy (AAV9-Triple-sgRNA-51-SA2). Following intra-muscular (IM) injection of P12 mice with AAV9s, muscle tissues were analyzed. Unexpectedly, dystrophin immunostaining of muscle cryosections from ΔEx50 mice injected with AAV9-Triple-sgRNA-51-SA2 revealed significantly higher numbers of dystrophin-positive fibers with an average of 95% restoration of normal fibers compared to ΔEx50 mice injected with AAV9-U6-sgRNA-51-SA2, AAV-H1-sgRNA-51-SA2 and AAV-7SK-sgRNA-51-SA2 with an average of 70%; 40% and 50% restoration of normal fibers respectively (FIGS. 15B).

[0377] Rescue of muscle structure and function following systemic delivery of AAV9-Cas9 and AAV9-sgRNA-51-SA2. Systemic delivery of AAV9-Cas9 and AAV9-sgRNA-51-SA2 to P4 ΔEx50 mice yielded widespread dystrophin expression in the heart, triceps, tibialis anterior (TA) muscle, and diaphragm in gene-edited ΔEx50 mice at 4 and 8 weeks post-injection (FIG. 16A and FIG. 17A). Western blot analysis confirmed the restoration of dystrophin expression in skeletal and heart muscles (FIG. 16B and FIG. 17B). Grip strength testing also showed a significant increase in muscle strength of ΔEx50 mice at 4 weeks post-intraperitoneal AAV9 injection compared to ΔEx50 control mice (wildtype control 92.6±1.63; ΔEx50 control 50.5±1.85; ΔEx50-AAV9-sgRNA-51 79.7±2.63) (FIG. 18A). Consistently, AAV9-sgRNA-51-SA2 gene-edited ΔEx50 mice also showed significant reductions in serum CK concentrations compared to ΔEx50 control mice (FIG. 18B).

[0378] Correction of dystrophin expression in a dog model of Duchenne muscular dystrophy. To further assess the efficiency and therapeutic potential of this new approach, the inventors investigated the correction the disease-causing mutation in a dog model of DMD, the ΔE50-MD dog, which harbors a missense mutation in the 5′ donor splice site of exon 50 that results in deletion of exon 50 ((Walmsley et al., 2010). The ΔE50-MD dog is an ideal canine model for the investigation of gene-editing as an approach to permanently correct the most common DMD mutations in humans.

[0379] The inventors used sgRNA (sgRNA-ex51-SA2) targeting the same genomic locus of the splice acceptor region. The sgRNA-ex51-SA2 sequence is highly conserved. The target sequences of the mouse sgRNA-ex51-SA2 and the dog sgRNA-ex51-SA2 (sgRNA-D-ex51-SA2) differ only by one single nucleotide (Table 4). The inventors delivered the sgRNA-D-ex51-SA2 in triple copy (AAV-D-Tri-SA2). Following intra-muscular (IM) injection of 1 month old dogs with AAVs, muscle tissues were analyzed. Remarkably, dystrophin immunostaining of muscle cryosections from ΔEx50 mice injected with AAV-Tri-SA2 revealed significantly higher numbers of dystrophin-positive fibers (FIG. 19). Western blot analysis confirmed the restoration of dystrophin expression in skeletal muscle (FIG. 20). Hematoxylin and eosin (H&E) staining of muscle showed that histopathologic hallmarks of muscular dystrophy, such as necrotic myofibers, were diminished in cranial tibialis muscle at 6-weeks post-AAV delivery (FIG. 21). This method, using a distinct sgRNA design, represents a major advance in efficiency of DMD correction with direct applicability to the patients with the most common dystrophin mutations.

[0380] All of the compositions and/or methods disclosed and claimed herein can be made and executed without undue experimentation in light of the present disclosure. While the compositions and methods of this disclosure have been described in terms of preferred embodiments, it will be apparent to those of skill in the art that variations may be applied to the compositions and/or methods and in the steps or in the sequence of steps of the method described herein without departing from the concept, spirit and scope of the disclosure. More specifically, it will be apparent that certain agents which are both chemically and physiologically related may be substituted for the agents described herein while the same or similar results would be achieved. All such similar substitutes and modifications apparent to those skilled in the art are deemed to be within the spirit, scope and concept of the disclosure as defined by the appended claims.

### VII. REFERENCES

[0381] The following references, to the extent that they provide exemplary procedural or other details supplementary to those set forth herein, are specifically incorporated herein by reference.
[0382] Angel et al., Mol. Cell. Biol., 7:2256, 1987a.
[0383] Angel et al., Cell, 49:729, 1987b.
[0384] Aartsma-Rus et al., Hum. Mutat. 30, 293-299, 2009.
[0385] Baichwal and Sugden, In: Gene Transfer, Kucherlapati (Ed), NY, Plenum Press, 117-148, 1986.
[0386] Banerji et al., Cell, 27(2 Pt 1):299-308, 1981.
[0387] Banerji et al., Cell, 33(3):729-740, 1983.
[0388] Barnes et al. J. Biol. Chem., 272(17):11510-7, 1997.
[0389] Baskin et al., EMBO Mol Med 6, 1610-1621, 2014.
[0390] Benvenisty and Neshif, Proc. Natl. Acad. Sci. USA, 83:9551-9555, 1986.
[0391] Berkhout et al., Cell, 59:273-282, 1989.
[0392] Bhaysar et al., Genomics, 35(1):11-23, 1996.
[0393] Bikard et al., Nucleic Acids Res. 41(15): 7429-7437, 2013.
[0394] Blanar et al., EMBO J. 8:1139, 1989.
[0395] Bodine and Ley, EMBO J. 6:2997, 1987.
[0396] Boshart et al., Cell, 41:521, 1985.
[0397] Bostick et al., Mol Ther 19, 1826-1832, 2011.
[0398] Bosze et al., EMBO J., 5(7):1615-1623, 1986.
[0399] Braddock et al., Cell, 58:269, 1989.
[0400] Brinster et al., Proc. Natl. Acad. Sci. USA, 82(13):4438-4442, 1985.
[0401] Bulla and Siddiqui, J. Virol., 62:1437, 1986.
[0402] Burridge et al., Nat. Methods 11, 855-860, 2014.
[0403] Bushby et al., Lancet Neurol., 9(1): 77-93 (2010).
[0404] Bushby et al., Lancet Neurol., 9(2): 177-198 (2010).
[0405] Campbell & Kahl, Nature 338, 259-262, 1989.
[0406] Campbell and Villarreal, Mol. Cell. Biol., 8:1993, 1988.
[0407] Campere and Tilghman, Genes and Dev., 3:537, 1989.
[0408] Campo et al., Nature, 303:77, 1983.
[0409] Celander and Haseltine, J Virology, 61:269, 1987.
[0410] Celander et al., J. Virology, 62:1314, 1988.
[0411] Chandler et al., Cell, 33:489, 1983.
[0412] Chang et al., Mol. Cell. Biol., 9:2153, 1989.
[0413] Chang et al., Stem Cells., 27:1042-1049, 2009.
[0414] Chatterjee et al., Proc. Natl. Acad. Sci. USA, 86:9114, 1989.
[0415] Chen and Okayama, Mol. Cell Biol., 7:2745-2752, 1987.
[0416] Cho et al., Nat. Biotechnol. 31(3): 230-232, 2013.
[0417] Choi et al., Cell, 53:519, 1988.
[0418] Cirak et al., The Lancet 378, 595-605, 2011.
[0419] Coffin, In: Virology, Fields et al. (Eds.), Raven Press, NY, 1437-1500, 1990.
[0420] Cohen et al., J. Cell. Physiol., 5:75, 1987.
[0421] Costa et al., Mol. Cell. Biol., 8:81, 1988.
[0422] Couch et al., Am. Rev. Resp. Dis., 88:394-403, 1963.
[0423] Coupar et al., Gene, 68:1-10, 1988.
[0424] Cripe et al., EMBO J. 6:3745, 1987.
[0425] Culotta and Hamer, Mol. Cell. Biol., 9:1376, 1989.
[0426] Dandolo et al., J. Virology, 47:55-64, 1983.
[0427] De Villiers et al., Nature, 312(5991):242-246, 1984.
[0428] Deschamps et al., Science, 230:1174-1177, 1985.
[0429] DeWitt et al., Sci Transl Med 8, 360ra134-360ra134, 2016.
[0430] Donnelly et al., J. Gen. Virol. 82, 1027-1041, 2001.
[0431] Dubensky et al., Proc. Natl. Acad. Sci. USA, 81:7529-7533, 1984.
[0432] Edbrooke et al., Mol. Cell. Biol., 9:1908, 1989.
[0433] Edlund et al., Science, 230:912-916, 1985.
[0434] EP 0273085
[0435] Fechheimer et al., Proc Natl. Acad. Sci. USA, 84:8463-8467, 1987.
[0436] Feng and Holland, Nature, 334:6178, 1988.
[0437] Ferkol et al., FASEB J., 7:1081-1091, 1993.
[0438] Firak et al., Mol. Cell. Biol., 6:3667, 1986.
[0439] Foecking et al., Gene, 45(1):101-105, 1986.
[0440] Fonfara et al., Nature 532, 517-521, 2016.
[0441] Fraley et al., Proc Natl. Acad. Sci. USA, 76:3348-3352, 1979
[0442] Franz et al., Cardoscience, 5(4):235-43, 1994.
[0443] Friedmann, Science, 244:1275-1281, 1989.
[0444] Fujita et al., Cell, 49:357, 1987.
[0445] Ghosh and Bachhawat, In: Liver Diseases, Targeted Diagnosis and Therapy Using Specific Receptors and Ligands, Wu et al. (Eds.), Marcel Dekker, N.Y., 87-104, 1991.
[0446] Ghosh-Choudhury et al., EMBO J., 6:1733-1739, 1987.
[0447] Gilles et al., Cell, 33:717, 1983.
[0448] Gloss et al., EMBO J., 6:3735, 1987.
[0449] Godbout et al., Mol. Cell. Biol., 8:1169, 1988.
[0450] Gomez-Foix et al., J. Biol. Chem., 267:25129-25134, 1992.
[0451] Goncalves et al., Mol Ther, 19(7): 1331-1341 (2011).
[0452] Goodbourn and Maniatis, Proc. Natl. Acad. Sci. USA, 85:1447, 1988.
[0453] Goodboum et al., Cell, 45:601, 1986.
[0454] Gopal, Mol. Cell Biol., 5:1188-1190, 1985.
[0455] Gopal-Srivastava et al., J. Mol. Cell. Biol., 15(12):7081-90, 1995.
[0456] Graham and Prevec, In: Methods in Molecular Biology: Gene Transfer and Expression Protocol, Murray (Ed.), Humana Press, Clifton, N.J., 7:109-128, 1991.
[0457] Graham and van der Eb, Virology, 52:456-467, 1973.
[0458] Graham et al., J. Gen. Virol., 36:59-72, 1977.
[0459] Greene et al., Immunology Today, 10:272, 1989
[0460] Grosschedl and Baltimore, Cell, 41:885, 1985.
[0461] Grunhaus and Horwitz, Seminar in Virology, 3:237-252, 1992.
[0462] Harland and Weintraub, J. Cell Biol., 101:1094-1099, 1985.
[0463] Haslinger and Karin, Proc. Natl. Acad. Sci. USA, 82:8572, 1985.
[0464] Hauber and Cullen, J. Virology, 62:673, 1988.
[0465] Hen et al., Nature, 321:249, 1986.
[0466] Hensel et al., Lymphokine Res., 8:347, 1989.
[0467] Hermonat and Muzycska, Proc. Nat'l Acad Sci. USA, 81:6466-6470, 1984.
[0468] Herr and Clarke, Cell, 45:461, 1986.
[0469] Hersdorffer et al., DNA Cell Biol., 9:713-723, 1990.
[0470] Herz and Gerard, Proc. Nat'l. Acad. Sci. USA 90:2812-2816, 1993.
[0471] Hirochika et al., J. Virol., 61:2599, 1987.
[0472] Holbrook et al., Virology, 157:211, 1987.
[0473] Hollinger & Chamberlain, Current Opinion in Neurology 28, 522-527, 2015.
[0474] Horlick and Benfield, Mol. Cell. Biol., 9:2396, 1989.
[0475] Horwich et al., J. Virol., 64:642-650, 1990.
[0476] Hsu et al., Natl Biotechnol. 31:827-832, 2013
[0477] Huang et al., Cell, 27:245, 1981.
[0478] Hug et al., Mol. Cell. Biol., 8:3065, 1988.
[0479] Hwang et al., Mol. Cell. Biol., 10:585, 1990.
[0480] Imagawa et al., Cell, 51:251, 1987.
[0481] Imbra and Karin, Nature, 323:555, 1986.
[0482] Imler et al., Mol. Cell. Biol., 7:2558, 1987.
[0483] Imperiale and Nevins, Mol. Cell. Biol., 4:875, 1984.
[0484] Jakobovits et al., Mol. Cell. Biol., 8:2555, 1988.
[0485] Jameel and Siddiqui, Mol. Cell. Biol., 6:710, 1986.
[0486] Jaynes et al., Mol. Cell. Biol., 8:62, 1988.
[0487] Jinek et al., Science 337, 816-821, 2012.
[0488] Johnson et al., Mol. Cell. Biol., 9:3393, 1989.
[0489] Jones and Shenk, Cell, 13:181-188, 1978.
[0490] Kadesch and Berg, Mol. Cell. Biol., 6:2593, 1986.
[0491] Kaneda et al., Science, 243:375-378, 1989.
[0492] Karin et al., Mol. Cell. Biol., 7:606, 1987.
[0493] Karlsson et al., EMBO J. 5:2377-2385, 1986.
[0494] Katinka et al., Cell, 20:393, 1980.
[0495] Kato et al., J Biol Chem., 266(6):3361-3364, 1991.
[0496] Kawamoto et al., Mol. Cell. Biol., 8:267, 1988.
[0497] Kelly et al., J. Cell Biol., 129(2):383-96, 1995.
[0498] Kiledjian et al., Mol. Cell. Biol., 8:145, 1988.
[0499] Kim et al., Nature Biotechnology, 1-2, 2016.
[0500] Kim et al., Nature Biotechnology 34, 876-881, 2016.
[0501] Kimura et al., Dev. Growth Differ., 39(3):257-65, 1997.
[0502] Klamut et al., Mol. Cell. Biol., 10:193, 1990.
[0503] Klein et al., Nature, 327:70-73, 1987.
[0504] Koch et al., Mol. Cell. Biol., 9:303, 1989.
[0505] Kriegler and Botchan, In: Eukaryotic Viral Vectors, Gluzman (Ed.), Cold Spring Harbor: Cold Spring Harbor Laboratory, NY, 1982.
[0506] Kriegler and Botchan, Mol. Cell. Biol., 3:325, 1983.
[0507] Kriegler et al., Cell, 38:483, 1984.
[0508] Kriegler et al., Cell, 53:45, 1988.
[0509] Kuhl et al., Cell, 50:1057, 1987.
[0510] Kunz et al., Nucl. Acids Res., 17:1121, 1989.
[0511] LaPointe et al., Hypertension, 27(3):715-22, 1996
[0512] LaPointe et al., J. Biol. Chem., 263(19):9075-8, 1988.
[0513] Larsen et al., Proc. Natl. Acad. Sci. USA., 83:8283, 1986.
[0514] Laspia et al., Cell, 59:283, 1989.
[0515] Latimer et al., Mol. Cell. Biol., 10:760, 1990.
[0516] Le Gal La Salle et al., Science, 259:988-990, 1993.
[0517] Lee et al., Nature, 294:228, 1981.
[0518] Levinson et al., Nature, 295:79, 1982.
[0519] Levrero et al., Gene, 101:195-202, 1991.
[0520] Lin et al., Mol. Cell. Biol., 10:850, 1990.
[0521] Long et al., Science 345: 1184-1188, 2014.
[0522] Long et al., Science 351, 400-403, 2016.
[0523] Pinello et al., Nature Biotechnol. 34, 695-697, 2016.
[0524] Long et al., JAMA Neurol., 3388, 2016.
[0525] Long et al., Science 351, 400-403, 2016.
[0526] Luria et al., EMBO J., 6:3307, 1987.
[0527] Lusky and Botchan, Proc. Natl. Acad. Sci. USA, 83:3609, 1986.
[0528] Lusky et al., Mol. Cell. Biol., 3:1108, 1983.
[0529] Majors and Varmus, Proc. Natl. Acad. Sci. USA, 80:5866, 1983.
[0530] Mali et al., Science 339, 823-826, 2013a.
[0531] Mali et al., Nat Methods 10, 957-963, 2013b.
[0532] Mali et al., Nat. Biotechnol. 31:833-838, 2013c.
[0533] Mann et al., Cell, 33:153-159, 1983.
[0534] Maresca et al., Genome Research 23, 539-546, 2013.
[0535] Markowitz et al., J Virol., 62:1120-1124, 1988.
[0536] McNeall et al., Gene, 76:81, 1989.
[0537] Miksicek et al., Cell, 46:203, 1986.
[0538] Millay et al., Nat. Med. 14, 442-447, 2008.
[0539] Mojica et al., J. Mol. Evol. 60, 174-182, 2005.
[0540] Mordacq and Linzer, Genes and Dev., 3:760, 1989.
[0541] Moreau et al., Nucl. Acids Res., 9:6047, 1981.
[0542] Moss et al., J. Gen. Physiol., 108(6):473-84, 1996.
[0543] Muesing et al., Cell, 48:691, 1987.
[0544] Nelson et al., Science 351, 403-407, 2016.
[0545] Nicolas and Rubinstein, In: Vectors: A survey of molecular cloning vectors and their uses, Rodriguez and Denhardt (Eds.), Stoneham: Butterworth, 494-513, 1988.
[0546] Nicolau and Sene, Biochim. Biophys. Acta, 721:185-190, 1982.
[0547] Nicolau et al., Methods Enzymol., 149:157-176, 1987.
[0548] Ondek et al., EMBO J., 6:1017, 1987.
[0549] Ornitz et al., Mol. Cell. Biol., 7:3466, 1987.
[0550] Padgett, R. A., Trends Genet. 28, 147-154, 2012.
[0551] Palmiter et al., Cell, 29:701, 1982a.
[0552] Palmiter et al., Nature, 300:611, 1982b.
[0553] Paskind et al., Virology, 67:242-248, 1975.
[0554] Pech et al., Mol. Cell. Biol., 9:396, 1989.
[0555] Perales et al., Proc. Natl. Acad. Sci. USA, 91(9):4086-4090, 1994.
[0556] Perez-Stable and Constantin, Mol. Cell. Biol., 10:1116, 1990.
[0557] Picard et al., Nature, 307:83, 1984.
[0558] Pinkert et al., Genes and Dev., 1:268, 1987.
[0559] Ponta et al., Proc. Natl. Acad. Sci. USA, 82:1020, 1985.
[0560] Porton et al., Mol. Cell. Biol., 10:1076, 1990.
[0561] Potter et al., Proc. Natl. Acad. Sci. USA, 81:7161-7165, 1984.
[0562] Queen and Baltimore, Cell, 35:741, 1983.
[0563] Quinn et al., Mol. Cell. Biol., 9:4713, 1989.
[0564] Racher et al., Biotech. Techniques, 9:169-174, 1995.
[0565] Ragot et al., Nature, 361:647-650, 1993.
[0566] Ran et al., Nature 520, 186-191, 2015.
[0567] Redondo et al., Science, 247:1225, 1990.
[0568] Reisman and Rotter, Mol. Cell. Biol., 9:3571, 1989.
[0569] Renan, Radiother. Oncol., 19:197-218, 1990.
[0570] Resendez Jr. et al., Mol. Cell. Biol., 8:4579, 1988.
[0571] Rich et al., Hum. Gene Ther., 4:461-476, 1993.
[0572] Ridgeway, In: Vectors: A survey of molecular cloning vectors and their uses, Stoneham: Butterworth, 467-492, 1988.
[0573] Ripe et al., Mol. Cell. Biol., 9:2224, 1989.
[0574] Rippe et al., Mol. Cell Biol., 10:689-695, 1990.
[0575] Riffling et al., Nuc. Acids Res., 17:1619, 1989.
[0576] Rosen et al., Cell, 41:813, 1988.
[0577] Rosenfeld et al., Cell, 68:143-155,1992.
[0578] Rosenfeld et al., Science, 252:431-434,1991.
[0579] Roux et al., Proc. Natl. Acad. Sci. USA, 86:9079-9083, 1989.
[0580] Sambrook and Russell, Molecular Cloning: A Laboratory Manual 3^{rd} Ed., Cold Spring Harbor Laboratory Press, 2001.

[0581] Sakai et al., Genes and Dev., 2:1144, 1988.
[0582] Satake et al., J. Virology, 62:970, 1988.
[0583] Schaffner et al., J. Mol. Biol., 201:81, 1988.
[0584] Searle et al., Mol. Cell. Biol., 5:1480, 1985.
[0585] Sharp et al., Cell, 59:229, 1989.
[0586] Shaul and Ben-Levy, EMBO J. 6:1913, 1987.
[0587] Sherman et al., Mol. Cell. Biol., 9:50, 1989.
[0588] Sleigh et al., J. EMBO, 4:3831, 1985.
[0589] Shimizu-Motohashi et al., Am J Transl Res 8, 2471-89, 2016.
[0590] Spalholz et al., Cell, 42:183, 1985.
[0591] Spandau and Lee, J. Virology, 62:427, 1988.
[0592] Spandidos and Wilkie, EMBO J. 2:1193, 1983.
[0593] Stephens and Hentschel, Biochem. 1, 248:1, 1987.
[0594] Stratford-Perricaudet and Perricaudet, In: Human Gene Transfer, Cohen-Haguenauer and Boiron (Eds.), John Libbey Eurotext, France, 51-61, 1991.
[0595] Stratford-Perricaudet et al., Hum. Gene. Ther., 1:241-256, 1990.
[0596] Stuart et al., Nature, 317:828, 1985.
[0597] Sullivan and Peterlin, Mol. Cell. Biol., 7:3315, 1987.
[0598] Swartzendruber and Lehman, J. Cell. Physiology, 85:179, 1975.
[0599] Tabebordbar et al., Science 351, 407-411, 2016.
[0600] Takebe et al., Mol. Cell. Biol., 8:466, 1988.
[0601] Tavernier et al., Nature, 301:634, 1983.
[0602] Taylor and Kingston, Mol. Cell. Biol., 10:165, 1990a.
[0603] Taylor and Kingston, Mol. Cell. Biol., 10:176, 1990b.
[0604] Taylor et al., J. Biol. Chem., 264:15160, 1989.
[0605] Temin, In: Gene Transfer, Kucherlapati (Ed.), NY, Plenum Press, 149-188, 1986.
[0606] Thiesen et al., J. Virology, 62:614, 1988.
[0607] Top et al., J. Infect. Dis., 124:155-160, 1971.
[0608] Toth et al., Biology Direct, 1-14, 2016.
[0609] Tronche et al., Mol. Biol. Med., 7:173, 1990.
[0610] Trudel and Constantini, Genes and Dev. 6:954, 1987.
[0611] Tsai et al., Nature Biotechnology 34, 882-887, 2016.
[0612] Tur-Kaspa et al., Mol. Cell Biol., 6:716-718, 1986.
[0613] Tyndell et al., Nuc. Acids. Res., 9:6231, 1981.
[0614] Vannice and Levinson, J. Virology, 62:1305, 1988.
[0615] Varmus et al., Cell, 25:23-36, 1981.
[0616] Vasseur et al., Proc Natl. Acad. Sci. USA., 77:1068, 1980.
[0617] Wagner et al., Proc. Natl. Acad. Sci. USA, 87(9):3410-3414, 1990.
[0618] Wang and Calame, Cell, 47:241, 1986.
[0619] Wang et al., Cell, 153:910-910, 2013.
[0620] Weber et al., Cell, 36:983, 1984.
[0621] Weinberger et al. Mol. Cell. Biol., 8:988, 1984.
[0622] Winoto et al., Cell, 59:649, 1989.
[0623] Wong et al., Gene, 10:87-94, 1980.
[0624] Wu and Wu, Adv. Drug Delivery Rev., 12:159-167, 1993.
[0625] Wu and Wu, Biochemistry, 27:887-892, 1988.
[0626] Wu and Wu, J. Biol. Chem., 262:4429-4432, 1987.
[0627] Wu et al., Cell Stem Cell 13, 659-662, 2013.
[0628] Wu et al., Nat Biotechnol 32, 670-676, 2014.
[0629] Xu et al., Mol Ther 24, 564-569, 2016.
[0630] Yamauchi-Takihara et al., Proc. Natl. Acad. Sci. USA, 86(10):3504-3508, 1989.
[0631] Yang et al., Proc. Natl. Acad. Sci. USA, 87:9568-9572, 1990.
[0632] Yin et al., Nat Biotechnol 32, 551-553, 2014.
[0633] Yin et al., Physiol Rev 93, 23-67, 2013.
[0634] Young et al., Cell Stem Cell 18, 533-540, 2016.
[0635] Yutzey et al. Mol. Cell. Biol., 9:1397, 1989.
[0636] Zechner et al., Cell Metabolism 12, 633-642, 2010.
[0637] Zelenin et al., FEBS Lett., 280:94-96, 1991.
[0638] Zetsche et al., Cell 163, 759-771, 2015.
[0639] Ziober and Kramer, J. Bio. Chem., 271(37):22915-22922, 1996.

The application's sequence listing, which the Patent Office published only in electronic form, follows.

SEQUENCE LISTING (1026 sequences)

SEQ ID NO: 1 - DNA, 63 bp, Artificial Sequence
  source: /note="Description of Artificial Sequence: Synthetic oligonucleotide"
tataaggaaaaaccaagcactcagccagtgaagctgccagtcagactgttactctagtgacac

SEQ ID NO: 2 - protein, 18 aa, Artificial Sequence
  source: /note="Description of Artificial Sequence: Synthetic peptide"
YKEKPSTQPVKLPVRLLL

SEQ ID NO: 3 - DNA, 18 bp, Artificial Sequence
  source: /note="Description of Artificial Sequence: Synthetic oligonucleotide"
ccagtgaaggcaacactg

SEQ ID NO: 4 - protein, 6 aa, Artificial Sequence
  source: /note="Description of Artificial Sequence: Synthetic peptide"
QPVKAT

SEQ ID NO: 5 - protein, 3685 aa, Homo sapiens
MLWWEEVEDCYEREDVQKKTFTKWVNAQFSKFGKQHIENLFSDLQDGRRLLDLLEGLTGQKLPKEKGSTRVHALNNVNKALRVLQNNNVDLVNIGSTDIVDGNHKLTLGLIWNIILHWQVKNVMKNIMAGLQQTNSEKILLSWVRQSTRNYPQVNVINFTTSWSDGLALNALIHSHRPDLFDWNSVVCQQSATQRLEHAFNIARYQLGIEKLLDPEDVDTTYPDKKSILMYITSLFQVLPQQVSIEAIQEVEMLPRPPKVTKEEHFQLHHQMHYSQQITVSLAQGYERTSSPKPRFKSYAYTQAAYVTTSDPTRSPFPSQHLEAPEDKSFGSSLMESEVNLDRYQTALEEVLSWLLSAEDTLQAQGEISNDVEVVKDQFHTHEGYMMDLTAHQGRVGNILQLGSKLIGTGKLSEDEETEVQEQMNLLNSRWECLRVASMEKQSNLHRVLMDLQNQKLKELNDWLTKTEERTRKMEEEPLGPDLEDLKRQVQQHKVLQEDLEQEQVRVNSLTHMVVVVDESSGDHATAALEEQLKVLGDRWANICRWTEDRWVLLQDILLKWQRLTEEQCLFSAWLSEKEDAVNKIHTTGFKDQNEMLSSLQKLAVLKADLEKKKQSMGKLYSLKQDLLSTLKNKSVTQKTEAWLDNFARCWDNLVQKLEKSTAQISQAVTTTQPSLTQTTVMETVTTVTTREQILVKHAQEELPPPPPQKKRQITVDSEIRKRLDVDITELHSWITRSEAVLQSPEFAIFRKEGNFSDLKEKVNAIEREKAEKFRKLQDASRSAQALVEQMVNEGVNADSIKQASEQLNSRWIEFCQLLSERLNWLEYQNNIIAFYNQLQQLEQMTTTAENWLKIQPTTPSEPTAIKSQLKICKDEVNRLSGLQPQIERLKIQSIALKEKGQGPMFLDADFVAFTNHFKQVFSDVQAREKELQTIFDTLPPMRYQETMSAIRTWVQQSETKLSIPQLSVTDYEIMEQRLGELQALQSSLQEQQSGLYYLSTTVKEMSKKAPSEISRKYQSEFEEIEGRWKKLSSQLVEHCQKLEEQMNKLRKIQNHIQTLKKWMAEVDVFLKEEWPALGDSEILKKQLKQCRLLVSDIQTIQPSLNSVNEGGQKIKNEAEPEFASRLETELKELNTQWDHMCQQVYARKEALKGGLEKTVSLQKDLSEMHEWMTQAEEEYLERDFEYKTPDELQKAVEEMKRAKEEAQQKEAKVKLLTESVNSVIAQAPPVAQEALKKELETLTTNYQWLCTRLNGKCKTLEEVWACWHELLSYLEKANKWLNEVEFKLKTTENIPGGAEEISEVLDSLENLMRHSEDNPNQIRILAQTLTDGGVMDELINEELETFNSRWRELHEEAVRRQKLLEQSIQSAQETEKSLHLIQESLTFIDKQLAAYIADKVDAAQMPQEAQKIQSDLTSHEISLEEMKKHNQGKEAAQRVLSQIDVAQKKLQDVSMKFRLFQKPANFELRLQESKMILDEVKMHLPALETKSVEQEVVQSQLNHCVNLYKSLSEVKSEVEMVIKTGRQIVQKKQTENPKELDERVTALKLHYNELGAKVTERKQQLEKCLKLSRKMRKEMNVLTEWLAATDMELTKRSAVEGMPSNLDSEVAWGKATQKEIEKQKVHLKSITEVGEALKTVLGKKETLVEDKLSLLNSNWIAVTSRAEEWLNLLLEYQKHMETFDQNVDHITKWIIQADTLLDESEKKKPQQKEDVLKRLKAELNDIRPKVDSTRDQAANLMANRGDHCRKLVEPQISELNHRFAAISHRIKTGKASIPLKELEQFNSDIQKLLEPLEAEIQQGVNLKEEDFNKDMNEDNEGTVKELLQRGDNLQQRITDERKREEIKIKQQLLQTKHNALKDLRSQRRKKALEISHQWYQYKRQADDLLKCLDDIEKKLASLPEPRDERKIKEIDRELQKKKEELNAVRRQAEGLSEDGAAMAVEPTQIQLSKRWREIESKFAQFRRLNFAQIHTVREETMMVMTEDMPLEISYVPSTYLTEITHVSQALLEVEQLLNAPDLCAKDFEDLFKQEESLKNIKDSLQQSSGRIDIIHSKKTAALQSATPVERVKLQEALSQLDFQWEKVNKMYKDRQGRFDRSVEKWRRFHYDIKIFNQWLTEAEQFLRKTQIPENWEHAKYKWYLKELQDGIGQRQTVVRTLNATGEEIIQQSSKTDASILQEKLGSLNLRWQEVCKQLSDRKKRLEEQKNILSEFQRDLNEFVLWLEEADNIASIPLEPGKEQQLKEKLEQVKLLVEELPLRQGILKQLNETGGPVLVSAPISPEEQDKLENKLKQTNLQWIKVSRALPEKQGEIEAQIKDLGQLEKKLEDLEEQLNHLLLWLSPIRNQLEIYNQPNQEGPFDVQETEIAVQAKQPDVEEILSKGQHLYKEKPATQPVKRKLEDLSSEWKAVNRLLQELRAKQPDLAPGLTTIGASPTQTVTLVTQPVVTKETAISKLEMPSSLMLEVPALADFNRAWTELTDWLSLLDQVIKSQRVMVGDLEDINEMIIKQKATMQDLEQRRPQLEELITAAQNLKNKTSNQEARTIITDRIERIQNQWDEVQEHLQNRRQQLNEMLKDSTQWLEAKEEAEQVLGQARAKLESWKEGPYTVDAIQKKITETKQLAKDLRQWQTNVDVANDLALKLLRDYSADDTRKVHMITENINASWRSIHKRVSEREAALEETHRLLQQFPLDLEKFLAWLTEAETTANVLQDATRKERLLEDSKGVKELMKQWQDLQGEIEAHTDVYHNLDENSQKILRSLEGSDDAVLLQRRLDNMNFKWSELRKKSLNIRSHLEASSDQWKRLHLSLQELLVWLQLKDDELSRQAPIGGDFPAVQKQNDVHRAFKRELKTKEPVIMSTLETVRIFLTEQPLEGLEKLYQEPRELPPEERAQNVTRLLRKQAEEVNTEWEKLNLHSADWQRKIDETLERLQELQEATDELDLKLRQAEVIKGSWQPVGDLLIDSLQDHLEKVKALRGEIAPLKENVSHVNDLARQLTTLGIQLSPYNLSTLEDLNTRWKLLQVAVEDRVRQLHEAHRDFGPASQHFLSTSVQGPWERAISPNKVPYYINHETQTTCWDHPKMTELYQSLADLNNVRFSAYRTAMKLRRLQKALCLDLLSLSAACDALDQHNLKQNDQPMDILQIINCLTTIYDRLEQEHNNLVNVPLCVDMCLNWLLNVYDTGRTGRIRVLSFKTGIISLCKAHLEDKYRYLFKQVASSTGFCDQRRLGLLLHDSIQIPRQLGEVASFGGSNIEPSVRSCFQFANNKPEIEAALFLDWMRLEPQSMVWLPVLHRVAAAETAKHQAKCNICKECPIIGFRYRSLKHFNYDICQSCFFSGRVAKGHKMHYPMVEYCTPTTSGEDVRDFAKVLKNKFRTKRYFAKHPRMGYLPVQTVLEGDNMETPVTLINFWPVDSAPASSPQLSHDDTHSRIEHYASRLAEMENSNGSYLNDSISPNESIDDEHLLIQHYCQSLNQDSPLSQPRSPAQILISLESEERGELERILADLEEENRNLQAEYDRLKQQHEHKGLSPLPSPPEMMPTSPQSPRDAELIAEAKLLRQHKGRLEARMQILEDHNKQLESQLHRLRQLLEQPQAEAKVNGTTVSSPSTSLQRSDSSQPMLLRVVGSQTSDSMGEEDLLSPPQDTSTGLEEVMEQLNNSFPSSRGRNTPGKPMREDTM

SEQ ID NO: 6 - DNA, 14069 bp, Homo sapiens
cgttaaatgcaaacgctgctctggctcatgtgtttgctccgaggtataggttttgttcgactgacgtatcagatagtcagagtggttaccacaccgacgttgtagcagctgcataataaatgactgaaagaatcatgttaggcatgcccacctaacctaacttgaatcatgcgaaaggggagctgttggaattcaaatagactttctggttcccagcagtcggcagtaatagaatgctttcaggaagatgacagaatcaggagaaagatgctgttttgcactatcttgatttgttacagcagccaacttattggcatgatggagtgacaggaaaaacagctggcatggaagatgaaagagaagatgttcaaaagaaaacattcacaaaatgggtaaatgcacaattttctaagtttgggaagcagcatattgagaacctcttcagtgacctacaggatgggaggcgcctcctagacctcctcgaaggcctgacagggcaaaaactgccaaaagaaaaaggatccacaagagttcatgccctgaacaatgtcaacaaggcactgcgggttttgcagaacaataatgttgatttagtgaatattggaagtactgacatcgtagatggaaatcataaactgactcttggtttgatttggaatataatcctccactggcaggtcaaaaatgtaatgaaaaatatcatggctggattgcaacaaaccaacagtgaaaagattctcctgagctgggtccgacaatcaactcgtaattatccacaggttaatgtaatcaacttcaccaccagctggtctgatggcctggctttgaatgctctcatccatagtcataggccagacctatttgactggaatagtgtggtttgccagcagtcagccacacaacgactggaacatgcattcaacatcgccagatatcaattaggcatagagaaactactcgatcctgaagatgttgataccacctatccagataagaagtccatcttaatgtacatcacatcactcttccaagttttgcctcaacaagtgagcattgaagccatccaggaagtggaaatgttgccaaggccacctaaagtgactaaagaagaacattttcagttacatcatcaaatgcactattctcaacagatcacggtcagtctagcacagggatatgagagaacttcttcccctaagcctcgattcaagagctatgcctacacacaggctgcttatgtcaccacctctgaccctacacggagcccatttccttcacagcatttggaagctcctgaagacaagtcatttggcagttcattgatggagagtgaagtaaacctggaccgttatcaaacagctttagaagaagtattatcgtggcttctttctgctgaggacacattgcaagcacaaggagagatttctaatgatgtggaagtggtgaaagaccagtttcatactcatgaggggtacatgatggatttgacagcccatcagggccgggttggtaatattctacaattgggaagtaagctgattggaacaggaaaattatcagaagatgaagaaactgaagtacaagagcagatgaatctcctaaattcaagatgggaatgcctcagggtagctagcatggaaaaacaaagcaatttacatagagttttaatggatctccagaatcagaaactgaaagagttgaatgactggctaacaaaaacagaagaaagaacaaggaaaatggaggaagagcctcttggacctgatcttgaagacctaaaacgccaagtacaacaacataaggtgcttcaagaagatctagaacaagaacaagtcagggtcaattctctcactcacatggtggtggtagttgatgaatctagtggagatcacgcaactgctgctttggaagaacaacttaaggtattgggagatcgatgggcaaacatctgtagatggacagaagaccgctgggttcttttacaagacatccttctcaaatggcaacgtcttactgaagaacagtgcctttttagtgcatggctttcagaaaaagaagatgcagtgaacaagattcacacaactggctttaaagatcaaaatgaaatgttatcaagtcttcaaaaactggccgttttaaaagcggatctagaaaagaaaaagcaatccatgggcaaactgtattcactcaaacaagatcttctttcaacactgaagaataagtcagtgacccagaagacggaagcatggctggataactttgcccggtgttgggataatttagtccaaaaacttgaaaagagtacagcacagatttcacaggctgtcaccaccactcagccatcactaacacagacaactgtaatggaaacagtaactacggtgaccacaagggaacagatcctggtaaagcatgctcaagaggaacttccaccaccacctccccaaaagaagaggcagattactgtggattctgaaattaggaaaaggttggatgttgatataactgaacttcacagctggattactcgctcagaagctgtgttgcagagtcctgaatttgcaatctttcggaaggaaggcaacttctcagacttaaaagaaaaagtcaatgccatagagcgagaaaaagctgagaagttcagaaaactgcaagatgccagcagatcagctcaggccctggtggaacagatggtgaatgagggtgttaatgcagatagcatcaaacaagcctcagaacaactgaacagccggtggatcgaattctgccagttgctaagtgagagacttaactggctggagtatcagaacaacatcatcgctttctataatcagctacaacaattggagcagatgacaactactgctgaaaactggttgaaaatccaacccaccaccccatcagagccaacagcaattaaaagtcagttaaaaatttgtaaggatgaagtcaaccggctatcaggtcttcaacctcaaattgaacgattaaaaattcaaagcatagccctgaaagagaaaggacaaggacccatgttcctggatgcagactttgtggcctttacaaatcattttaagcaagtcttttctgatgtgcaggccagagagaaagagctacagacaatttttgacactttgccaccaatgcgctatcaggagaccatgagtgccatcaggacatgggtccagcagtcagaaaccaaactctccatacctcaacttagtgtcaccgactatgaaatcatggagcagagactcggggaattgcaggctttacaaagttctctgcaagagcaacaaagtggcctatactatctcagcaccactgtgaaagagatgtcgaagaaagcgccctctgaaattagccggaaatatcaatcagaatttgaagaaattgagggacgctggaagaagctctcctcccagctggttgagcattgtcaaaagctagaggagcaaatgaataaactccgaaaaattcagaatcacatacaaaccctgaagaaatggatggctgaagttgatgtttttctgaaggaggaatggcctgcccttggggattcagaaattctaaaaaagcagctgaaacagtgcagacttttagtcagtgatattcagacaattcagcccagtctaaacagtgtcaatgaaggtgggcagaagataaagaatgaagcagagccagagtttgcttcgagacttgagacagaactcaaagaacttaacactcagtgggatcacatgtgccaacaggtctatgccagaaaggaggccttgaagggaggtttggagaaaactgtaagcctccagaaagatctatcagagatgcacgaatggatgacacaagctgaagaagagtatcttgagagagattttgaatataaaactccagatgaattacagaaagcagttgaagagatgaagagagctaaagaagaggcccaacaaaaagaagcgaaagtgaaactccttactgagtctgtaaatagtgtcatagctcaagctccacctgtagcacaagaggccttaaaaaaggaacttgaaactctaaccaccaactaccagtggctctgcactaggctgaatgggaaatgcaagactttggaagaagtttgggcatgttggcatgagttattgtcatacttggagaaagcaaacaagtggctaaatgaagtagaatttaaacttaaaaccactgaaaacattcctggcggagctgaggaaatctctgaggtgctagattcacttgaaaatttgatgcgacattcagaggataacccaaatcagattcgcatattggcacagaccctaacagatggcggagtcatggatgagctaatcaatgaggaacttgagacatttaattctcgttggagggaactacatgaagaggctgtaaggaggcaaaagttgcttgaacagagcatccagtctgcccaggagactgaaaaatccttacacttaatccaggagtccctcacattcattgacaagcagttggcagcttatattgcagacaaggtggacgcagctcaaatgcctcaggaagcccagaaaatccaatctgatttgacaagtcatgagatcagtttagaagaaatgaagaaacataatcaggggaaggaggctgcccaaagagtcctgtctcagattgatgttgcacagaaaaaattacaagatgtctccatgaagtttcgattattccagaaaccagccaattttgagcagcgtctacaagaaagtaagatgattttagatgaagtgaagatgcacttgcctgcattggaaacaaagagtgtggaacaggaagtagtacagtcacagctaaatcattgtgtgaacttgtataaaagtctgagtgaagtgaagtctgaagtggaaatggtgataaagactggacgtcagattgtacagaaaaagcagacggaaaatcccaaagaacttgatgaaagagtaacagctttgaaattgcattataatgagctgggagcaaaggtaacagaaagaaagcaacagttggagaaatgcttgaaattgtcccgtaagatgcgaaaggaaatgaatgtcttgacagaatggctggcagctacagatatggaattgacaaagagatcagcagttgaaggaatgcctagtaatttggattctgaagttgcctggggaaaggctactcaaaaagagattgagaaacagaaggtgcacctgaagagtatcacagaggtaggagaggccttgaaaacagttttgggcaagaaggagacgttggtggaagataaactcagtcttctgaatagtaactggatagctgtcacctcccgagcagaagagtggttaaatcttttgttggaataccagaaacacatggaaacttttgaccagaatgtggaccacatcacaaagtggatcattcaggctgacacacttttggatgaatcagagaaaaagaaaccccagcaaaaagaagacgtgcttaagcgtttaaaggcagaactgaatgacatacgcccaaaggtggactctacacgtgaccaagcagcaaacttgatggcaaaccgcggtgaccactgcaggaaattagtagagccccaaatctcagagctcaaccatcgatttgcagccatttcacacagaattaagactggaaaggcctccattcctttgaaggaattggagcagtttaactcagatatacaaaaattgcttgaaccactggaggctgaaattcagcagggggtgaatctgaaagaggaagacttcaataaagatatgaatgaagacaatgagggtactgtaaaagaattgttgcaaagaggagacaacttacaacaaagaatcacagatgagagaaagcgagaggaaataaagataaaacagcagctgttacagacaaaacataatgctctcaaggatttgaggtctcaaagaagaaaaaaggctctagaaatttctcatcagtggtatcagtacaagaggcaggctgatgatctcctgaaatgcttggatgacattgaaaaaaaattagccagcctacctgagcccagagatgaaaggaaaataaaggaaattgatcgggaattgcagaagaagaaagaggagctgaatgcagtgcgtaggcaagctgagggcttgtctgaggatggggccgcaatggcagtggagccaactcagatccagctcagcaagcgctggcgggaaattgagagcaaatttgctcagtttcgaagactcaactttgcacaaattcacactgtccgtgaagaaacgatgatggtgatgactgaagacatgcctttggaaatttcttatgtgccttctacttatttgactgaaatcactcatgtctcacaagccctattagaagtggaacaacttctcaatgctcctgacctctgtgctaaggactttgaagatctctttaagcaagaggagtctctgaagaatataaaagatagtctacaacaaagctcaggtcggattgacattattcatagcaagaagacagcagcattgcaaagtgcaacgcctgtggaaagggtgaagctacaggaagctctctcccagcttgatttccaatgggaaaaagttaacaaaatgtacaaggaccgacaagggcgatttgacagatctgttgagaaatggcggcgttttcattatgatataaagatatttaatcagtggctaacagaagctgaacagtttctcagaaagacacaaattcctgagaattgggaacatgctaaatacaaatggtatcttaaggaactccaggatggcattgggcagcggcaaactgttgtcagaacattgaatgcaactggggaagaaataattcagcaatcctcaaaaacagatgccagtattctacaggaaaaattgggaagcctgaatctgcggtggcaggaggtctgcaaacagctgtcagacagaaaaaagaggctagaagaacaaaagaatatcttgtcagaatttcaaagagatttaaatgaatttgttttatggttggaggaagcagataacattgctagtatcccacttgaacctggaaaagagcagcaactaaaagaaaagcttgagcaagtcaagttactggtggaagagttgcccctgcgccagggaattctcaaacaattaaatgaaactggaggacccgtgcttgtaagtgctcccataagcccagaagagcaagataaacttgaaaataagctcaagcagacaaatctccagtggataaaggtttccagagctttacctgagaaacaaggagaaattgaagctcaaataaaagaccttgggcagcttgaaaaaaagcttgaagaccttgaagagcagttaaatcatctgctgctgtggttatctcctattaggaatcagttggaaatttataaccaaccaaaccaagaaggaccatttgacgttcaggaaactgaaatagcagttcaagctaaacaaccggatgtggaagagattttgtctaaagggcagcatttgtacaaggaaaaaccagccactcagccagtgaagaggaagttagaagatctgagctctgagtggaaggcggtaaaccgtttacttcaagagctgagggcaaagcagcctgacctagctcctggactgaccactattggagcctctcctactcagactgttactctggtgacacaacctgtggttactaaggaaactgccatctccaaactagaaatgccatcttccttgatgttggaggtacctgctctggcagatttcaaccgggcttggacagaacttaccgactggctttctctgcttgatcaagttataaaatcacagagggtgatggtgggtgaccttgaggatatcaacgagatgatcatcaagcagaaggcaacaatgcaggatttggaacagaggcgtccccagttggaagaactcattaccgctgcccaaaatttgaaaaacaagaccagcaatcaagaggctagaacaatcattacggatcgaattgaaagaattcagaatcagtgggatgaagtacaagaacaccttcagaaccggaggcaacagttgaatgaaatgttaaaggattcaacacaatggctggaagctaaggaagaagctgagcaggtcttaggacaggccagagccaagcttgagtcatggaaggagggtccctatacagtagatgcaatccaaaagaaaatcacagaaaccaagcagttggccaaagacctccgccagtggcagacaaatgtagatgtggcaaatgacttggccctgaaacttctccgggattattctgcagatgataccagaaaagtccacatgataacagagaatatcaatgcctcttggagaagcattcataaaagggtgagtgagcgagaggctgctttggaagaaactcatagattactgcaacagttccccctggacctggaaaagtttcttgcctggcttacagaagctgaaacaactgccaatgtcctacaggatgctacccgtaaggaaaggctcctagaagactccaagggagtaaaagagctgatgaaacaatggcaagacctccaaggtgaaattgaagctcacacagatgtttatcacaacctggatgaaaacagccaaaaaatcctgagatccctggaaggttccgatgatgcagtcctgttacaaagacgtttggataacatgaacttcaagtggagtgaacttcggaaaaagtctctcaacattaggtcccatttggaagccagttctgaccagtggaagcgtctgcacctttctctgcaggaacttctggtgtggctacagctgaaagatgatgaattaagccggcaggcacctattggaggcgactttccagcagttcagaagcagaacgatgtacatagggccttcaagagggaattgaaaactaaagaacctgtaatcatgagtactcttgagactgtacgaatatttctgacagagcagcctttggaaggactagagaaactctaccaggagcccagagagctgcctcctgaggagagagcccagaatgtcactcggcttctacgaaagcaggctgaggaggtcaatactgagtgggaaaaattgaacctgcactccgctgactggcagagaaaaatagatgagacccttgaaagactccaggaacttcaagaggccacggatgagctggacctcaagctgcgccaagctgaggtgatcaagggatcctggcagcccgtgggcgatctcctcattgactctctccaagatcacctcgagaaagtcaaggcacttcgaggagaaattgcgcctctgaaagagaacgtgagccacgtcaatgaccttgctcgccagcttaccactttgggcattcagctctcaccgtataacctcagcactctggaagacctgaacaccagatggaagcttctgcaggtggccgtcgaggaccgagtcaggcagctgcatgaagcccacagggactttggtccagcatctcagcactttctttccacgtctgtccagggtccctgggagagagccatctcgccaaacaaagtgccctactatatcaaccacgagactcaaacaacttgctgggaccatcccaaaatgacagagctctaccagtctttagctgacctgaataatgtcagattctcagcttataggactgccatgaaactccgaagactgcagaaggccctttgcttggatctcttgagcctgtcagctgcatgtgatgccttggaccagcacaacctcaagcaaaatgaccagcccatggatatcctgcagattattaattgtttgaccactatttatgaccgcctggagcaagagcacaacaatttggtcaacgtccctctctgcgtggatatgtgtctgaactggctgctgaatgtttatgatacgggacgaacagggaggatccgtgtcctgtcttttaaaactggcatcatttccctgtgtaaagcacatttggaagacaagtacagataccttttcaagcaagtggcaagttcaacaggattttgtgaccagcgcaggctgggcctccttctgcatgattctatccaaattccaagacagttgggtgaagttgcatcctttgggggcagtaacattgagccaagtgtccggagctgcttccaatttgctaataataagccagagatcgaagcggccctcttcctagactggatgagactggaaccccagtccatggtgtggctgcccgtcctgcacagagtggctgctgcagaaactgccaagcatcaggccaaatgtaacatctgcaaagagtgtccaatcattggattcaggtacaggagtctaaagcactttaattatgacatctgccaaagctgctttttttctggtcgagttgcaaaaggccataaaatgcactatcccatggtggaatattgcactccgactacatcaggagaagatgttcgagactttgccaaggtactaaaaaacaaatttcgaaccaaaaggtattttgcgaagcatccccgaatgggctacctgccagtgcagactgtcttagagggggacaacatggaaactcccgttactctgatcaacttctggccagtagattctgcgcctgcctcgtcccctcagctttcacacgatgatactcattcacgcattgaacattatgctagcaggctagcagaaatggaaaacagcaatggatcttatctaaatgatagcatctctcctaatgagagcatagatgatgaacatttgttaatccagcattactgccaaagtttgaaccaggactcccccctgagccagcctcgtagtcctgcccagatcttgatttccttagagagtgaggaaagaggggagctagagagaatcctagcagatcttgaggaagaaaacaggaatctgcaagcagaatatgaccgtctaaagcagcagcacgaacataaaggcctgtccccactgccgtcccctcctgaaatgatgcccacctctccccagagtccccgggatgctgagctcattgctgaggccaagctactgcgtcaacacaaaggccgcctggaagccaggatgcaaatcctggaagaccacaataaacagctggagtcacagttacacaggctaaggcagctgctggagcaaccccaggcagaggccaaagtgaatggcacaacggtgtcctctccttctacctctctacagaggtccgacagcagtcagcctatgctgctccgagtggttggcagtcaaacttcggactccatgggtgaggaagatcttctcagtcctccccaggacacaagcacagggttagaggaggtgatggagcaactcaacaactccttccctagttcaagaggaagaaatacccctggaaagccaatgagagaggacacaatgtaggaagtcttttccacatggcagatgatttgggcagagcgatggagtccttagtatcagtcatgacagatgaagaaggagcagaataaatgttttacaactcctgattcccgcatggtttttataatattcatacaacaaagaggattagacagtaagagtttacaagaaataaatctatatttttgtgaagggtagtggtattatactgtagatttcagtagtttctaagtctgttattgttttgttaacaatggcaggttttacacgtctatgcaattgtacaaaaaagttataagaaaactacatgtaaaatcttgatagctaaataacttgccatttctttatatggaacgcattttgggttgtttaaaaatttataacagttataaagaaagattgtaaactaaagtgtgctttataaaaaaaagttgtttataaaaacccctaaaaacaaaacaaacacacacacacacacatacacacacacacacaaaactttgaggcagcgcattgttttgcatccttttggcgtgatatccatatgaaattcatggctttttctttttttgcatattaaagataagacttcctctaccaccacaccaaatgactactacacactgctcatttgagaactgtcagctgagtggggcaggcttgagttttcatttcatatatctatatgtctataagtatataaatactatagttatatagataaagagatacgaatttctatagactgactttttccattttttaaatgttcatgtcacatcctaatagaaagaaattacttctagtcagtcatccaggcttacctgcttggtctagaatggatttttcccggagccggaagccaggaggaaactacaccacactaaaacattgtctacagctccagatgtttctcattttaaacaactttccactgacaacgaaagtaaagtaaagtattggatttttttaaagggaacatgtgaatgaatacacaggacttattatatcagagtgagtaatcggttggttggttgattgattgattgattgatacattcagcttcctgctgctagcaatgccacgatttagatttaatgatgcttcagtggaaatcaatcagaaggtattctgaccttgtgaacatcagaaggtattttttaactcccaagcagtagcaggacgatgatagggctggagggctatggattcccagcccatccctgtgaaggagtaggccactctttaagtgaaggattggatgattgttcataatacataaagttctctgtaattacaactaaattattatgccctcttctcacagtcaaaaggaactgggtggtttggtttttgttgcttttttagatttattgtcccatgtgggatgagtttttaaatgccacaagacataatttaaaataaataaactttgggaaaaggtgtaaaacagtagccccatcacatttgtgatactgacaggtatcaacccagaagcccatgaactgtgtttccatcctttgcatttctctgcgagtagttccacacaggtttgtaagtaagtaagaaagaaggcaaattgattcaaatgttacaaaaaaacccttcttggtggattagacaggttaaatatataaacaaacaaacaaaaattgctcaaaaaagaggagaaaagctcaagaggaaaagctaaggactggtaggaaaaagctttactctttcatgccattttatttctttttgatttttaaatcattcattcaatagataccaccgtgtgacctataattttgcaaatctgttacctctgacatcaagtgtaattagcttttggagagtgggctgacatcaagtgtaattagcttttggagagtgggttttgtccattattaataattaattaattaacatcaaacacggcttctcatgctatttctacctcactttggttttggggtgttcctgataattgtgcacacctgagttcacagcttcaccacttgtccattgcgttattttctttttcctttataattctttctttttccttcataattttcaaaagaaaacccaaagctctaaggtaacaaattaccaaattacatgaagatttggtttttgtcttgcatttttttcctttatgtgacgctggaccttttctttacccaaggatttttaaaactcagatttaaaacaaggggttactttacatcctactaagaagtttaagtaagtaagtttcattctaaaatcagaggtaaatagagtgcataaataattttgttttaatctttttgtttttcttttagacacattagctctggagtgagtctgtcataatatttgaacaaaaattgagagctttattgctgcattttaagcataattaatttggacattatttcgtgttgtgttctttataaccaccaagtattaaactgtaaatcataatgtaactgaagcataaacatcacatggcatgttttgtcattgttttcaggtactgagttcttacttgagtatcataatatattgtgttttaacaccaacactgtaacatttacgaattatttttttaaacttcagttttactgcattttcacaacatatcagacttcaccaaatatatgccttactattgtattatagtactgctttactgtgtatctcaataaagcacgcagttatgttac

SEQ ID NO: 7 - protein, 3677 aa, Homo sapiens
MEDEREDVQKKTFTKWVNAQFSKFGKQHIENLFSDLQDGRRLLDLLEGLTGQKLPKEKGSTRVHALNNVNKALRVLQNNNVDLVNIGSTDIVDGNHKLTLGLIWNIILHWQVKNVMKNIMAGLQQTNSEKILLSWVRQSTRNYPQVNVINFTTSWSDGLALNALIHSHRPDLFDWNSVVCQQSATQRLEHAFNIARYQLGIEKLLDPEDVDTTYPDKKSILMYITSLFQVLPQQVSIEAIQEVEMLPRPPKVTKEEHFQLHHQMHYSQQITVSLAQGYERTSSPKPRFKSYAYTQAAYVTTSDPTRSPFPSQHLEAPEDKSFGSSLMESEVNLDRYQTALEEVLSWLLSAEDTLQAQGEISNDVEVVKDQFHTHEGYMMDLTAHQGRVGNILQLGSKLIGTGKLSEDEETEVQEQMNLLNSRWECLRVASMEKQSNLHRVLMDLQNQKLKELNDWLTKTEERTRKMEEEPLGPDLEDLKRQVQQHKVLQEDLEQEQVRVNSLTHMVVVVDESSGDHATAALEEQLKVLGDRWANICRWTEDRWVLLQDILLKWQRLTEEQCLFSAWLSEKEDAVNKIHTTGFKDQNEMLSSLQKLAVLKADLEKKKQSMGKLYSLKQDLLSTLKNKSVTQKTEAWLDNFARCWDNLVQKLEKSTAQISQAVTTTQPSLTQTTVMETVTTVTTREQILVKHAQEELPPPPPQKKRQITVDSEIRKRLDVDITELHSWITRSEAVLQSPEFAIFRKEGNFSDLKEKVNAIEREKAEKFRKLQDASRSAQALVEQMVNEGVNADSIKQASEQLNSRWIEFCQLLSERLNWLEYQNNIIAFYNQLQQLEQMTTTAENWLKIQPTTPSEPTAIKSQLKICKDEVNRLSGLQPQIERLKIQSIALKEKGQGPMFLDADFVAFTNHFKQVFSDVQAREKELQTIFDTLPPMRYQETMSAIRTWVQQSETKLSIPQLSVTDYEIMEQRLGELQALQSSLQEQQSGLYYLSTTVKEMSKKAPSEISRKYQSEFEEIEGRWKKLSSQLVEHCQKLEEQMNKLRKIQNHIQTLKKWMAEVDVFLKEEWPALGDSEILKKQLKQCRLLVSDIQTIQPSLNSVNEGGQKIKNEAEPEFASRLETELKELNTQWDHMCQQVYARKEALKGGLEKTVSLQKDLSEMHEWMTQAEEEYLERDFEYKTPDELQKAVEEMKRAKEEAQQKEAKVKLLTESVNSVIAQAPPVAQEALKKELETLTTNYQWLCTRLNGKCKTLEEVWACWHELLSYLEKANKWLNEVEFKLKTTENIPGGAEEISEVLDSLENLMRHSEDNPNQIRILAQTLTDGGVMDELINEELETFNSRWRELHEEAVRRQKLLEQSIQSAQETEKSLHLIQESLTFIDKQLAAYIADKVDAAQMPQEAQKIQSDLTSHEISLEEMKKHNQGKEAAQRVLSQIDVAQKKLQDVSMKFRLFQKPANFEQRLQESKMILDEVKMHLPALETKSVEQEVVQSQLNHCVNLYKSLSEVKSEVEMVIKTGRQIVQKKQTENPKELDERVTALKLHYNELGAKVTERKQQLEKCLKLSRKMRKEMNVLTEWLAATDMELTKRSAVEGMPSNLDSEVAWGKATQKEIEKQKVHLKSITEVGEALKTVLGKKETLVEDKLSLLNSNWIAVTSRAEEWLNLLLEYQKHMETFDQNVDHITKWIIQADTLLDESEKKKPQQKEDVLKRLKAELNDIRPKVDSTRDQAANLMANRGDHCRKLVEPQISELNHRFAAISHRIKTGKASIPLKELEQFNSDIQKLLEPLEAEIQQGVNLKEEDFNKDMNEDNEGTVKELLQRGDNLQQRITDERKREEIKIKQQLLQTKHNALKDLRSQRRKKALEISHQWYQYKRQADDLLKCLDDIEKKLASLPEPRDERKIKEIDRELQKKKEELNAVRRQAEGLSEDGAAMAVEPTQIQLSKRWREIESKFAQFRRLNFAQIHTVREETMMVMTEDMPLEISYVPSTYLTEITHVSQALLEVEQLLNAPDLCAKDFEDLFKQEESLKNIKDSLQQSSGRIDIIHSKKTAALQSATPVERVKLQEALSQLDFQWEKVNKMYKDRQGRFDRSVEKWRRFHYDIKIFNQWLTEAEQFLRKTQIPENWEHAKYKWYLKELQDGIGQRQTVVRTLNATGEEIIQQSSKTDASILQEKLGSLNLRWQEVCKQLSDRKKRLEEQKNILSEFQRDLNEFVLWLEEADNIASIPLEPGKEQQLKEKLEQVKLLVEELPLRQGILKQLNETGGPVLVSAPISPEEQDKLENKLKQTNLQWIKVSRALPEKQGEIEAQIKDLGQLEKKLEDLEEQLNHLLLWLSPIRNQLEIYNQPNQEGPFDVQETEIAVQAKQPDVEEILSKGQHLYKEKPATQPVKRKLEDLSSEWKAVNRLLQELRAKQPDLAPGLTTIGASPTQTVTLVTQPVVTKETAISKLEMPSSLMLEVPALADFNRAWTELTDWLSLLDQVIKSQRVMVGDLEDINEMIIKQKATMQDLEQRRPQLEELITAAQNLKNKTSNQEARTIITDRIERIQNQWDEVQEHLQNRRQQLNEMLKDSTQWLEAKEEAEQVLGQARAKLESWKEGPYTVDAIQKKITETKQLAKDLRQWQTNVDVANDLALKLLRDYSADDTRKVHMITENINASWRSIHKRVSEREAALEETHRLLQQFPLDLEKFLAWLTEAETTANVLQDATRKERLLEDSKGVKELMKQWQDLQGEIEAHTDVYHNLDENSQKILRSLEGSDDAVLLQRRLDNMNFKWSELRKKSLNIRSHLEASSDQWKRLHLSLQELLVWLQLKDDELSRQAPIGGDFPAVQKQNDVHRAFKRELKTKEPVIMSTLETVRIFLTEQPLEGLEKLYQEPRELPPEERAQNVTRLLRKQAEEVNTEWEKLNLHSADWQRKIDETLERLQELQEATDELDLKLRQAEVIKGSWQPVGDLLIDSLQDHLEKVKALRGEIAPLKENVSHVNDLARQLTTLGIQLSPYNLSTLEDLNTRWKLLQVAVEDRVRQLHEAHRDFGPASQHFLSTSVQGPWERAISPNKVPYYINHETQTTCWDHPKMTELYQSLADLNNVRFSAYRTAMKLRRLQKALCLDLLSLSAACDALDQHNLKQNDQPMDILQIINCLTTIYDRLEQEHNNLVNVPLCVDMCLNWLLNVYDTGRTGRIRVLSFKTGIISLCKAHLEDKYRYLFKQVASSTGFCDQRRLGLLLHDSIQIPRQLGEVASFGGSNIEPSVRSCFQFANNKPEIEAALFLDWMRLEPQSMVWLPVLHRVAAAETAKHQAKCNICKECPIIGFRYRSLKHFNYDICQSCFFSGRVAKGHKMHYPMVEYCTPTTSGEDVRDFAKVLKNKFRTKRYFAKHPRMGYLPVQTVLEGDNMETPVTLINFWPVDSAPASSPQLSHDDTHSRIEHYASRLAEMENSNGSYLNDSISPNESIDDEHLLIQHYCQSLNQDSPLSQPRSPAQILISLESEERGELERILADLEEENRNLQAEYDRLKQQHEHKGLSPLPSPPEMMPTSPQSPRDAELIAEAKLLRQHKGRLEARMQILEDHNKQLESQLHRLRQLLEQPQAEAKVNGTTVSSPSTSLQRSDSSQPMLLRVVGSQTSDSMGEEDLLSPPQDTSTGLEEVMEQLNNSFPSSRGRNTPGKPMREDTM

SEQ ID NO: 8 - DNA, 13993 bp, Homo sapiens
tcctggcatcagttactgtgttgactcactcagtgttgggatcactcactttccccctacaggactcagatctgggaggcaattaccttcggagaaaaacgaataggaaaaactgaagtgttactttttttaaagctgctgaagtttgttggtttctcattgtttttaagcctactggagcaataaagtttgaagaacttttaccaggttttttttatcgctgccttgatatacacttttcaaaatgctttggtgggaagaagtagaggactgttatgaaagagaagatgttcaaaagaaaacattcacaaaatgggtaaatgcacaattttctaagtttgggaagcagcatattgagaacctcttcagtgacctacaggatgggaggcgcctcctagacctcctcgaaggcctgacagggcaaaaactgccaaaagaaaaaggatccacaagagttcatgccctgaacaatgtcaacaaggcactgcgggttttgcagaacaataatgttgatttagtgaatattggaagtactgacatcgtagatggaaatcataaactgactcttggtttgatttggaatataatcctccactggcaggtcaaaaatgtaatgaaaaatatcatggctggattgcaacaaaccaacagtgaaaagattctcctgagctgggtccgacaatcaactcgtaattatccacaggttaatgtaatcaacttcaccaccagctggtctgatggcctggctttgaatgctctcatccatagtcataggccagacctatttgactggaatagtgtggtttgccagcagtcagccacacaacgactggaacatgcattcaacatcgccagatatcaattaggcatagagaaactactcgatcctgaagatgttgataccacctatccagataagaagtccatcttaatgtacatcacatcactcttccaagttttgcctcaacaagtgagcattgaagccatccaggaagtggaaatgttgccaaggccacctaaagtgactaaagaagaacattttcagttacatcatcaaatgcactattctcaacagatcacggtcagtctagcacagggatatgagagaacttcttcccctaagcctcgattcaagagctatgcctacacacaggctgcttatgtcaccacctctgaccctacacggagcccatttccttcacagcatttggaagctcctgaagacaagtcatttggcagttcattgatggagagtgaagtaaacctggaccgttatcaaacagctttagaagaagtattatcgtggcttctttctgctgaggacacattgcaagcacaaggagagatttctaatgatgtggaagtggtgaaagaccagtttcatactcatgaggggtacatgatggatttgacagcccatcagggccgggttggtaatattctacaattgggaagtaagctgattggaacaggaaaattatcagaagatgaagaaactgaagtacaagagcagatgaatctcctaaattcaagatgggaatgcctcagggtagctagcatggaaaaacaaagcaatttacatagagttttaatggatctccagaatcagaaactgaaagagttgaatgactggctaacaaaaacagaagaaagaacaaggaaaatggaggaagagcctcttggacctgatcttgaagacctaaaacgccaagtacaacaacataaggtgcttcaagaagatctagaacaagaacaagtcagggtcaattctctcactcacatggtggtggtagttgatgaatctagtggagatcacgcaactgctgctttggaagaacaacttaaggtattgggagatcgatgggcaaacatctgtagatggacagaagaccgctgggttcttttacaagacatccttctcaaatggcaacgtcttactgaagaacagtgcctttttagtgcatggctttcagaaaaagaagatgcagtgaacaagattcacacaactggctttaaagatcaaaatgaaatgttatcaagtcttcaaaaactggccgttttaaaagcggatctagaaaagaaaaagcaatccatgggcaaactgtattcactcaaacaagatcttctttcaacactgaagaataagtcagtgacccagaagacggaagcatggctggataactttgcccggtgttgggataatttagtccaaaaacttgaaaagagtacagcacagatttcacaggctgtcaccaccactcagccatcactaacacagacaactgtaatggaaacagtaactacggtgaccacaagggaacagatcctggtaaagcatgctcaagaggaacttccaccaccacctccccaaaagaagaggcagattactgtggattctgaaattaggaaaaggttggatgttgatataactgaacttcacagctggattactcgctcagaagctgtgttgcagagtcctgaatttgcaatctttcggaaggaaggcaacttctcagacttaaaagaaaaagtcaatgccatagagcgagaaaaagctgagaagttcagaaaactgcaagatgccagcagatcagctcaggccctggtggaacagatggtgaatgagggtgttaatgcagatagcatcaaacaagcctcagaacaactgaacagccggtggatcgaattctgccagttgctaagtgagagacttaactggctggagtatcagaacaacatcatcgctttctataatcagctacaacaattggagcagatgacaactactgctgaaaactggttgaaaatccaacccaccaccccatcagagccaacagcaattaaaagtcagttaaaaatttgtaaggatgaagtcaaccggctatcaggtcttcaacctcaaattgaacgattaaaaattcaaagcatagccctgaaagagaaaggacaaggacccatgttcctggatgcagactttgtggcctttacaaatcattttaagcaagtcttttctgatgtgcaggccagagagaaagagctacagacaatttttgacactttgccaccaatgcgctatcaggagaccatgagtgccatcaggacatgggtccagcagtcagaaaccaaactctccatacctcaacttagtgtcaccgactatgaaatcatggagcagagactcggggaattgcaggctttacaaagttctctgcaagagcaacaaagtggcctatactatctcagcaccactgtgaaagagatgtcgaagaaagcgccctctgaaattagccggaaatatcaatcagaatttgaagaaattgagggacgctggaagaagctctcctcccagctggttgagcattgtcaaaagctagaggagcaaatgaataaactccgaaaaattcagaatcacatacaaaccctgaagaaatggatggctgaagttgatgtttttctgaaggaggaatggcctgcccttggggattcagaaattctaaaaaagcagctgaaacagtgcagacttttagtcagtgatattcagacaattcagcccagtctaaacagtgtcaatgaaggtgggcagaagataaagaatgaagcagagccagagtttgcttcgagacttgagacagaactcaaagaacttaacactcagtgggatcacatgtgccaacaggtctatgccagaaaggaggccttgaagggaggtttggagaaaactgtaagcctccagaaagatctatcagagatgcacgaatggatgacacaagctgaagaagagtatcttgagagagattttgaatataaaactccagatgaattacagaaagcagttgaagagatgaagagagctaaagaagaggcccaacaaaaagaagcgaaagtgaaactccttactgagtctgtaaatagtgtcatagctcaagctccacctgtagcacaagaggccttaaaaaaggaacttgaaactctaaccaccaactaccagtggctctgcactaggctgaatgggaaatgcaagactttggaagaagtttgggcatgttggcatgagttattgtcatacttggagaaagcaaacaagtggctaaatgaagtagaatttaaacttaaaaccactgaaaacattcctggcggagctgaggaaatctctgaggtgctagattcacttgaaaatttgatgcgacattcagaggataacccaaatcagattcgcatattggcacagaccctaacagatggcggagtcatggatgagctaatcaatgaggaacttgagacatttaattctcgttggagggaactacatgaagaggctgtaaggaggcaaaagttgcttgaacagagcatccagtctgcccaggagactgaaaaatccttacacttaatccaggagtccctcacattcattgacaagcagttggcagcttatattgcagacaaggtggacgcagctcaaatgcctcaggaagcccagaaaatccaatctgatttgacaagtcatgagatcagtttagaagaaatgaagaaacataatcaggggaaggaggctgcccaaagagtcctgtctcagattgatgttgcacagaaaaaattacaagatgtctccatgaagtttcgattattccagaaaccagccaattttgagcagcgtctacaagaaagtaagatgattttagatgaagtgaagatgcacttgcctgcattggaaacaaagagtgtggaacaggaagtagtacagtcacagctaaatcattgtgtgaacttgtataaaagtctgagtgaagtgaagtctgaagtggaaatggtgataaagactggacgtcagattgtacagaaaaagcagacggaaaatcccaaagaacttgatgaaagagtaacagctttgaaattgcattataatgagctgggagcaaaggtaacagaaagaaagcaacagttggagaaatgcttgaaattgtcccgtaagatgcgaaaggaaatgaatgtcttgacagaatggctggcagctacagatatggaattgacaaagagatcagcagttgaaggaatgcctagtaatttggattctgaagttgcctggggaaaggctactcaaaaagagattgagaaacagaaggtgcacctgaagagtatcacagaggtaggagaggccttgaaaacagttttgggcaagaaggagacgttggtggaagataaactcagtcttctgaatagtaactggatagctgtcacctcccgagcagaagagtggttaaatcttttgttggaataccagaaacacatggaaacttttgaccagaatgtggaccacatcacaaagtggatcattcaggctgacacacttttggatgaatcagagaaaaagaaaccccagcaaaaagaagacgtgcttaagcgtttaaaggcagaactgaatgacatacgcccaaaggtggactctacacgtgaccaagcagcaaacttgatggcaaaccgcggtgaccactgcaggaaattagtagagccccaaatctcagagctcaaccatcgatttgcagccatttcacacagaattaagactggaaaggcctccattcctttgaaggaattggagcagtttaactcagatatacaaaaattgcttgaaccactggaggctgaaattcagcagggggtgaatctgaaagaggaagacttcaataaagatatgaatgaagacaatgagggtactgtaaaagaattgttgcaaagaggagacaacttacaacaaagaatcacagatgagagaaagcgagaggaaataaagataaaacagcagctgttacagacaaaacataatgctctcaaggatttgaggtctcaaagaagaaaaaaggctctagaaatttctcatcagtggtatcagtacaagaggcaggctgatgatctcctgaaatgcttggatgacattgaaaaaaaattagccagcctacctgagcccagagatgaaaggaaaataaaggaaattgatcgggaattgcagaagaagaaagaggagctgaatgcagtgcgtaggcaagctgagggcttgtctgaggatggggccgcaatggcagtggagccaactcagatccagctcagcaagcgctggcgggaaattgagagcaaatttgctcagtttcgaagactcaactttgcacaaattcacactgtccgtgaagaaacgatgatggtgatgactgaagacatgcctttggaaatttcttatgtgccttctacttatttgactgaaatcactcatgtctcacaagccctattagaagtggaacaacttctcaatgctcctgacctctgtgctaaggactttgaagatctctttaagcaagaggagtctctgaagaatataaaagatagtctacaacaaagctcaggtcggattgacattattcatagcaagaagacagcagcattgcaaagtgcaacgcctgtggaaagggtgaagctacaggaagctctctcccagcttgatttccaatgggaaaaagttaacaaaatgtacaaggaccgacaagggcgatttgacagatctgttgagaaatggcggcgttttcattatgatataaagatatttaatcagtggctaacagaagctgaacagtttctcagaaagacacaaattcctgagaattgggaacatgctaaatacaaatggtatcttaaggaactccaggatggcattgggcagcggcaaactgttgtcagaacattgaatgcaactggggaagaaataattcagcaatcctcaaaaacagatgccagtattctacaggaaaaattgggaagcctgaatctgcggtggcaggaggtctgcaaacagctgtcagacagaaaaaagaggctagaagaacaaaagaatatcttgtcagaatttcaaagagatttaaatgaatttgttttatggttggaggaagcagataacattgctagtatcccacttgaacctggaaaagagcagcaactaaaagaaaagcttgagcaagtcaagttactggtggaagagttgcccctgcgccagggaattctcaaacaattaaatgaaactggaggacccgtgcttgtaagtgctcccataagcccagaagagcaagataaacttgaaaataagctcaagcagacaaatctccagtggataaaggtttccagagctttacctgagaaacaaggagaaattgaagctcaaataaaagaccttgggcagcttgaaaaaaagcttgaagaccttgaagagcagttaaatcatctgctgctgtggttatctcctattaggaatcagttggaaatttataaccaaccaaaccaagaaggaccatttgacgttcaggaaactgaaatagcagttcaagctaaacaaccggatgtggaagagattttgtctaaagggcagcatttgtacaaggaaaaaccagccactcagccagtgaagaggaagttagaagatctgagctctgagtggaaggcggtaaaccgtttacttcaagagctgagggcaaagcagcctgacctagctcctggactgaccactattggagcctctcctactcagactgttactctggtgacacaacctgtggttactaaggaaactgccatctccaaactagaaatgccatcttccttgatgttggaggtacctgctctggcagatttcaaccgggcttggacagaacttaccgactggctttctctgcttgatcaagttataaaatcacagagggtgatggtgggtgaccttgaggatatcaacgagatgatcatcaagcagaaggcaacaatgcaggatttggaacagaggcgtccccagttggaagaactcattaccgctgcccaaaatttgaaaaacaagaccagcaatcaagaggctagaacaatcattacggatcgaattgaaagaattcagaatcagtgggatgaagtacaagaacaccttcagaaccggaggcaacagttgaatgaaatgttaaaggattcaacacaatggctggaagctaaggaagaagctgagcaggtcttaggacaggccagagccaagcttgagtcatggaaggagggtccctatacagtagatgcaatccaaaagaaaatcacagaaaccaagcagttggccaaagacctccgccagtggcagacaaatgtagatgtggcaaatgacttggccctgaaacttctccgggattattctgcagatgataccagaaaagtccacatgataacagagaatatcaatgcctcttggagaagcattcataaaagggtgagtgagcgagaggctgctttggaagaaactcatagattactgcaacagttccccctggacctggaaaagtttcttgcctggcttacagaagctgaaacaactgccaatgtcctacaggatgctacccgtaaggaaaggctcctagaagactccaagggagtaaaagagctgatgaaacaatggcaagacctccaaggtgaaattgaagctcacacagatgtttatcacaacctggatgaaaacagccaaaaaatcctgagatccctggaaggttccgatgatgcagtcctgttacaaagacgtttggataacatgaacttcaagtggagtgaacttcggaaaaagtctctcaacattaggtcccatttggaagccagttctgaccagtggaagcgtctgcacctttctctgcaggaacttctggtgtggctacagctgaaagatgatgaattaagccggcaggcacctattggaggcgactttccagcagttcagaagcagaacgatgtacatagggccttcaagagggaattgaaaactaaagaacctgtaatcatgagtactcttgagactgtacgaatatttctgacagagcagcctttggaaggactagagaaactctaccaggagcccagagagctgcctcctgaggagagagcccagaatgtcactcggcttctacgaaagcaggctgaggaggtcaatactgagtgggaaaaattgaacctgcactccgctgactggcagagaaaaatagatgagacccttgaaagactccaggaacttcaagaggccacggatgagctggacctcaagctgcgccaagctgaggtgatcaagggatcctggcagcccgtgggcgatctcctcattgactctctccaagatcacctcgagaaagtcaaggcacttcgaggagaaattgcgcctctgaaagagaacgtgagccacgtcaatgaccttgctcgccagcttaccactttgggcattcagctctcaccgtataacctcagcactctggaagacctgaacaccagatggaagcttctgcaggtggccgtcgaggaccgagtcaggcagctgcatgaagcccacagggactttggtccagcatctcagcactttctttccacgtctgtccagggtccctgggagagagccatctcgccaaacaaagtgccctactatatcaaccacgagactcaaacaacttgctgggaccatcccaaaatgacagagctctaccagtctttagctgacctgaataatgtcagattctcagcttataggactgccatgaaactccgaagactgcagaaggccctttgcttggatctcttgagcctgtcagctgcatgtgatgccttggaccagcacaacctcaagcaaaatgaccagcccatggatatcctgcagattattaattgtttgaccactatttatgaccgcctggagcaagagcacaacaatttggtcaacgtccctctctgcgtggatatgtgtctgaactggctgctgaatgtttatgatacgggacgaacagggaggatccgtgtcctgtcttttaaaactggcatcatttccctgtgtaaagcacatttggaagacaagtacagataccttttcaagcaagtggcaagttcaacaggattttgtgaccagcgcaggctgggcctccttctgcatgattctatccaaattccaagacagttgggtgaagttgcatcctttgggggcagtaacattgagccaagtgtccggagctgcttccaatttgctaataataagccagagatcgaagcggccctcttcctagactggatgagactggaaccccagtccatggtgtggctgcccgtcctgcacagagtggctgctgcagaaactgccaagcatcaggccaaatgtaacatctgcaaagagtgtccaatcattggattcaggtacaggagtctaaagcactttaattatgacatctgccaaagctgctttttttctggtcgagttgcaaaaggccataaaatgcactatcccatggtggaatattgcactccgactacatcaggagaagatgttcgagactttgccaaggtactaaaaaacaaatttcgaaccaaaaggtattttgcgaagcatccccgaatgggctacctgccagtgcagactgtcttagagggggacaacatggaaactcccgttactctgatcaacttctggccagtagattctgcgcctgcctcgtcccctcagctttcacacgatgatactcattcacgcattgaacattatgctagcaggctagcagaaatggaaaacagcaatggatcttatctaaatgatagcatctctcctaatgagagcatagatgatgaacatttgttaatccagcattactgccaaagtttgaaccaggactcccccctgagccagcctcgtagtcctgcccagatcttgatttccttagagagtgaggaaagaggggagctagagagaatcctagcagatcttgaggaagaaaacaggaatctgcaagcagaatatgaccgtctaaagcagcagcacgaacataaaggcctgtccccactgccgtcccctcctgaaatgatgcccacctctccccagagtccccgggatgctgagctcattgctgaggccaagctactgcgtcaacacaaaggccgcctggaagccaggatgcaaatcctggaagaccacaataaacagctggagtcacagttacacaggctaaggcagctgctggagcaaccccaggcagaggccaaagtgaatggcacaacggtgtcctctccttctacctctctacagaggtccgacagcagtcagcctatgctgctccgagtggttggcagtcaaacttcggactccatgggtgaggaagatcttctcagtcctccccaggacacaagcacagggttagaggaggtgatggagcaactcaacaactccttccctagttcaagaggaagaaatacccctggaaagccaatgagagaggacacaatgtaggaagtcttttccacatggcagatgatttgggcagagcgatggagtccttagtatcagtcatgacagatgaagaaggagcagaataaatgttttacaactcctgattcccgcatggtttttataatattcatacaacaaagaggattagacagtaagagtttacaagaaataaatctatatttttgtgaagggtagtggtattatactgtagatttcagtagtttctaagtctgttattgttttgttaacaatggcaggttttacacgtctatgcaattgtacaaaaaagttataagaaaactacatgtaaaatcttgatagctaaataacttgccatttctttatatggaacgcattttgggttgtttaaaaatttataacagttataaagaaagattgtaaactaaagtgtgctttataaaaaaaagttgtttataaaaacccctaaaaacaaaacaaacacacacacacacacatacacacacacacacaaaactttgaggcagcgcattgttttgcatccttttggcgtgatatccatatgaaattcatggctttttctttttttgcatattaaagataagacttcctctaccaccacaccaaatgactactacacactgctcatttgagaactgtcagctgagtggggcaggcttgagttttcatttcatatatctatatgtctataagtatataaatactatagttatatagataaagagatacgaatttctatagactgactttttccattttttaaatgttcatgtcacatcctaatagaaagaaattacttctagtcagtcatccaggcttacctgcttggtctagaatggatttttcccggagccggaagccaggaggaaactacaccacactaaaacattgtctacagctccagatgtttctcattttaaacaactttccactgacaacgaaagtaaagtaaagtattggatttttttaaagggaacatgtgaatgaatacacaggacttattatatcagagtgagtaatcggttggttggttgattgattgattgattgatacattcagcttcctgctgctagcaatgccacgatttagatttaatgatgcttcagtggaaatcaatcagaaggtattctgaccttgtgaacatcagaaggtattttttaactcccaagcagtagcaggacgatgatagggctggagggctatggattcccagcccatccctgtgaaggagtaggccactctttaagtgaaggattggatgattgttcataatacataaagttctctgtaattacaactaaattattatgccctcttctcacagtcaaaaggaactgggtggtttggtttttgttgcttttttagatttattgtcccatgtgggatgagtttttaaatgccacaagacataatttaaaataaataaactttgggaaaaggtgtaaaacagtagccccatcacatttgtgatactgacaggtatcaacccagaagcccatgaactgtgtttccatcctttgcatttctctgcgagtagttccacacaggtttgtaagtaagtaagaaagaaggcaaattgattcaaatgttacaaaaaaacccttcttggtggattagacaggttaaatatataaacaaacaaacaaaaattgctcaaaaaagaggagaaaagctcaagaggaaaagctaaggactggtaggaaaaagctttactctttcatgccattttatttctttttgatttttaaatcattcattcaatagataccaccgtgtgacctataattttgcaaatctgttacctctgacatcaagtgtaattagcttttggagagtgggctgacatcaagtgtaattagcttttggagagtgggttttgtccattattaataattaattaattaacatcaaacacggcttctcatgctatttctacctcactttggttttggggtgttcctgataattgtgcacacctgagttcacagcttcaccacttgtccattgcgttattttctttttcctttataattctttctttttccttcataattttcaaaagaaaacccaaagctctaaggtaacaaattaccaaattacatgaagatttggtttttgtcttgcatttttttcctttatgtgacgctggaccttttctttacccaaggatttttaaaactcagatttaaaacaaggggttactttacatcctactaagaagtttaagtaagtaagtttcattctaaaatcagaggtaaatagagtgcataaataattttgttttaatctttttgtttttcttttagacacattagctctggagtgagtctgtcataatatttgaacaaaaattgagagctttattgctgcattttaagcataattaatttggacattatttcgtgttgtgttctttataaccaccaagtattaaactgtaaatcataatgtaactgaagcataaacatcacatggcatgttttgtcattgttttcaggtactgagttcttacttgagtatcataatatattgtgttttaacaccaacactgtaacatttacgaattatttttttaaacttcagttttactgcattttcacaacatatcagacttcaccaaatatatgccttactattgtattatagtactgctttactgtgtatctcaataaagcacgcagttatgttac

SEQ ID NO: 9 - protein, 3685 aa, Homo sapiens
MLWWEEVEDCYEREDVQKKTFTKWVNAQFSKFGKQHIENLFSDLQDGRRLLDLLEGLTGQKLPKEKGSTRVHALNNVNKALRVLQNNNVDLVNIGSTDIVDGNHKLTLGLIWNIILHWQVKNVMKNIMAGLQQTNSEKILLSWVRQSTRNYPQVNVINFTTSWSDGLALNALIHSHRPDLFDWNSVVCQQSATQRLEHAFNIARYQLGIEKLLDPEDVDTTYPDKKSILMYITSLFQVLPQQVSIEAIQEVEMLPRPPKVTKEEHFQLHHQMHYSQQITVSLAQGYERTSSPKPRFKSYAYTQAAYVTTSDPTRSPFPSQHLEAPEDKSFGSSLMESEVNLDRYQTALEEVLSWLLSAEDTLQAQGEISNDVEVVKDQFHTHEGYMMDLTAHQGRVGNILQLGSKLIGTGKLSEDEETEVQEQMNLLNSRWECLRVASMEKQSNLHRVLMDLQNQKLKELNDWLTKTEERTRKMEEEPLGPDLEDLKRQVQQHKVLQEDLEQEQVRVNSLTHMVVVVDESSGDHATAALEEQLKVLGDRWANICRWTEDRWVLLQDILLKWQRLTEEQCLFSAWLSEKEDAVNKIHTTGFKDQNEMLSSLQKLAVLKADLEKKKQSMGKLYSLKQDLLSTLKNKSVTQKTEAWLDNFARCWDNLVQKLEKSTAQISQAVTTTQPSLTQTTVMETVTTVTTREQILVKHAQEELPPPPPQKKRQITVDSEIRKRLDVDITELHSWITRSEAVLQSPEFAIFRKEGNFSDLKEKVNAIEREKAEKFRKLQDASRSAQALVEQMVNEGVNADSIKQASEQLNSRWIEFCQLLSERLNWLEYQNNIIAFYNQLQQLEQMTTTAENWLKIQPTTPSEPTAIKSQLKICKDEVNRLSGLQPQIERLKIQSIALKEKGQGPMFLDADFVAFTNHFKQVFSDVQAREKELQTIFDTLPPMRYQETMSAIRTWVQQSETKLSIPQLSVTDYEIMEQRLGELQALQSSLQEQQSGLYYLSTTVKEMSKKAPSEISRKYQSEFEEIEGRWKKLSSQLVEHCQKLEEQMNKLRKIQNHIQTLKKWMAEVDVFLKEEWPALGDSEILKKQLKQCRLLVSDIQTIQPSLNSVNEGGQKIKNEAEPEFASRLETELKELNTQWDHMCQQVYARKEALKGGLEKTVSLQKDLSEMHEWMTQAEEEYLERDFEYKTPDELQKAVEEMKRAKEEAQQKEAKVKLLTESVNSVIAQAPPVAQEALKKELETLTTNYQWLCTRLNGKCKTLEEVWACWHELLSYLEKANKWLNEVEFKLKTTENIPGGAEEISEVLDSLENLMRHSEDNPNQIRILAQTLTDGGVMDELINEELETFNSRWRELHEEAVRRQKLLEQSIQSAQETEKSLHLIQESLTFIDKQLAAYIADKVDAAQMPQEAQKIQSDLTSHEISLEEMKKHNQGKEAAQRVLSQIDVAQKKLQDVSMKFRLFQKPANFEQRLQESKMILDEVKMHLPALETKSVEQEVVQSQLNHCVNLYKSLSEVKSEVEMVIKTGRQIVQKKQTENPKELDERVTALKLHYNELGAKVTERKQQLEKCLKLSRKMRKEMNVLTEWLAATDMELTKRSAVEGMPSNLDSEVAWGKATQKEIEKQKVHLKSITEVGEALKTVLGKKETLVEDKLSLLNSNWIAVTSRAEEWLNLLLEYQKHMETFDQNVDHITKWIIQADTLLDESEKKKPQQKEDVLKRLKAELNDIRPKVDSTRDQAANLMANRGDHCRKLVEPQISELNHRFAAISHRIKTGKASIPLKELEQFNSDIQKLLEPLEAEIQQGVNLKEEDFNKDMNEDNEGTVKELLQRGDNLQQRITDERKREEIKIKQQLLQTKHNALKDLRSQRRKKALEISHQWYQYKRQADDLLKCLDDIEKKLASLPEPRDERKIKEIDRELQKKKEELNAVRRQAEGLSEDGAAMAVEPTQIQLSKRWREIESKFAQFRRLNFAQIHTVREETMMVMTEDMPLEISYVPSTYLTEITHVSQALLEVEQLLNAPDLCAKDFEDLFKQEESLKNIKDSLQQSSGRIDIIHSKKTAALQSATPVERVKLQEALSQLDFQWEKVNKMYKDRQGRFDRSVEKWRRFHYDIKIFNQWLTEAEQFLRKTQIPENWEHAKYKWYLKELQDGIGQRQTVVRTLNATGEEIIQQSSKTDASILQEKLGSLNLRWQEVCKQLSDRKKRLEEQKNILSEFQRDLNEFVLWLEEADNIASIPLEPGKEQQLKEKLEQVKLLVEELPLRQGILKQLNETGGPVLVSAPISPEEQDKLENKLKQTNLQWIKVSRALPEKQGEIEAQIKDLGQLEKKLEDLEEQLNHLLLWLSPIRNQLEIYNQPNQEGPFDVQETEIAVQAKQPDVEEILSKGQHLYKEKPATQPVKRKLEDLSSEWKAVNRLLQELRAKQPDLAPGLTTIGASPTQTVTLVTQPVVTKETAISKLEMPSSLMLEVPALADFNRAWTELTDWLSLLDQVIKSQRVMVGDLEDINEMIIKQKATMQDLEQRRPQLEELITAAQNLKNKTSNQEARTIITDRIERIQNQWDEVQEHLQNRRQQLNEMLKDSTQWLEAKEEAEQVLGQARAKLESWKEGPYTVDAIQKKITETKQLAKDLRQWQTNVDVANDLALKLLRDYSADDTRKVHMITENINASWRSIHKRVSEREAALEETHRLLQQFPLDLEKFLAWLTEAETTANVLQDATRKERLLEDSKGVKELMKQWQDLQGEIEAHTDVYHNLDENSQKILRSLEGSDDAVLLQRRLDNMNFKWSELRKKSLNIRSHLEASSDQWKRLHLSLQELLVWLQLKDDELSRQAPIGGDFPAVQKQNDVHRAFKRELKTKEPVIMSTLETVRIFLTEQPLEGLEKLYQEPRELPPEERAQNVTRLLRKQAEEVNTEWEKLNLHSADWQRKIDETLERLQELQEATDELDLKLRQAEVIKGSWQPVGDLLIDSLQDHLEKVKALRGEIAPLKENVSHVNDLARQLTTLGIQLSPYNLSTLEDLNTRWKLLQVAVEDRVRQLHEAHRDFGPASQHFLSTSVQGPWERAISPNKVPYYINHETQTTCWDHPKMTELYQSLADLNNVRFSAYRTAMKLRRLQKALCLDLLSLSAACDALDQHNLKQNDQPMDILQIINCLTTIYDRLEQEHNNLVNVPLCVDMCLNWLLNVYDTGRTGRIRVLSFKTGIISLCKAHLEDKYRYLFKQVASSTGFCDQRRLGLLLHDSIQIPRQLGEVASFGGSNIEPSVRSCFQFANNKPEIEAALFLDWMRLEPQSMVWLPVLHRVAAAETAKHQAKCNICKECPIIGFRYRSLKHFNYDICQSCFFSGRVAKGHKMHYPMVEYCTPTTSGEDVRDFAKVLKNKFRTKRYFAKHPRMGYLPVQTVLEGDNMETPVTLINFWPVDSAPASSPQLSHDDTHSRIEHYASRLAEMENSNGSYLNDSISPNESIDDEHLLIQHYCQSLNQDSPLSQPRSPAQILISLESEERGELERILADLEEENRNLQAEYDRLKQQHEHKGLSPLPSPPEMMPTSPQSPRDAELIAEAKLLRQHKGRLEARMQILEDHNKQLESQLHRLRQLLEQPQAEAKVNGTTVSSPSTSLQRSDSSQPMLLRVVGSQTSDSMGEEDLLSPPQDTSTGLEEVMEQLNNSFPSSRGRNTPGKPMREDTM

SEQ ID NO: 10 - DNA, 14000 bp, Homo sapiens
atgctgtctgtgaagctgaatctgtgagaacacctcactattcacggcaaccggagtggaagaaacaggtgcaaaaagattgtgtgtttgtctgcttttgtgaggctggtcagagattctgtgcctgctttatctgtgcttggctatgactctacctccaggtttaccataccccatagaatgtgtaagagaaaagtaccaacagggaaatcagcaaaaagctttcctatgaaggtgtgtagccagcctccgcagaatttgaaatgtctgaggtctcatctgatgaaagagaagatgttcaaaagaaaacattcacaaaatgggtaaatgcacaattttctaagtttgggaagcagcatattgagaacctcttcagtgacctacaggatgggaggcgcctcctagacctcctcgaaggcctgacagggcaaaaactgccaaaagaaaaaggatccacaagagttcatgccctgaacaatgtcaacaaggcactgcgggttttgcagaacaataatgttgatttagtgaatattggaagtactgacatcgtagatggaaatcataaactgactcttggtttgatttggaatataatcctccactggcaggtcaaaaatgtaatgaaaaatatcatggctggattgcaacaaaccaacagtgaaaagattctcctgagctgggtccgacaatcaactcgtaattatccacaggttaatgtaatcaacttcaccaccagctggtctgatggcctggctttgaatgctctcatccatagtcataggccagacctatttgactggaatagtgtggtttgccagcagtcagccacacaacgactggaacatgcattcaacatcgccagatatcaattaggcatagagaaactactcgatcctgaagatgttgataccacctatccagataagaagtccatcttaatgtacatcacatcactcttccaagttttgcctcaacaagtgagcattgaagccatccaggaagtggaaatgttgccaaggccacctaaagtgactaaagaagaacattttcagttacatcatcaaatgcactattctcaacagatcacggtcagtctagcacagggatatgagagaacttcttcccctaagcctcgattcaagagctatgcctacacacaggctgcttatgtcaccacctctgaccctacacggagcccatttccttcacagcatttggaagctcctgaagacaagtcatttggcagttcattgatggagagtgaagtaaacctggaccgttatcaaacagctttagaagaagtattatcgtggcttctttctgctgaggacacattgcaagcacaaggagagatttctaatgatgtggaagtggtgaaagaccagtttcatactcatgaggggtacatgatggatttgacagcccatcagggccgggttggtaatattctacaattgggaagtaagctgattggaacaggaaaattatcagaagatgaagaaactgaagtacaagagcagatgaatctcctaaattcaagatgggaatgcctcagggtagctagcatggaaaaacaaagcaatttacatagagttttaatggatctccagaatcagaaactgaaagagttgaatgactggctaacaaaaacagaagaaagaacaaggaaaatggaggaagagcctcttggacctgatcttgaagacctaaaacgccaagtacaacaacataaggtgcttcaagaagatctagaacaagaacaagtcagggtcaattctctcactcacatggtggtggtagttgatgaatctagtggagatcacgcaactgctgctttggaagaacaacttaaggtattgggagatcgatgggcaaacatctgtagatggacagaagaccgctgggttcttttacaagacatccttctcaaatggcaacgtcttactgaagaacagtgcctttttagtgcatggctttcagaaaaagaagatgcagtgaacaagattcacacaactggctttaaagatcaaaatgaaatgttatcaagtcttcaaaaactggccgttttaaaagcggatctagaaaagaaaaagcaatccatgggcaaactgtattcactcaaacaagatcttctttcaacactgaagaataagtcagtgacccagaagacggaagcatggctggataactttgcccggtgttgggataatttagtccaaaaacttgaaaagagtacagcacagatttcacaggctgtcaccaccactcagccatcactaacacagacaactgtaatggaaacagtaactacggtgaccacaagggaacagatcctggtaaagcatgctcaagaggaacttccaccaccacctccccaaaagaagaggcagattactgtggattctgaaattaggaaaaggttggatgttgatataactgaacttcacagctggattactcgctcagaagctgtgttgcagagtcctgaatttgcaatctttcggaaggaaggcaacttctcagacttaaaagaaaaagtcaatgccatagagcgagaaaaagctgagaagttcagaaaactgcaagatgccagcagatcagctcaggccctggtggaacagatggtgaatgagggtgttaatgcagatagcatcaaacaagcctcagaacaactgaacagccggtggatcgaattctgccagttgctaagtgagagacttaactggctggagtatcagaacaacatcatcgctttctataatcagctacaacaattggagcagatgacaactactgctgaaaactggttgaaaatccaacccaccaccccatcagagccaacagcaattaaaagtcagttaaaaatttgtaaggatgaagtcaaccggctatcaggtcttcaacctcaaattgaacgattaaaaattcaaagcatagccctgaaagagaaaggacaaggacccatgttcctggatgcagactttgtggcctttacaaatcattttaagcaagtcttttctgatgtgcaggccagagagaaagagctacagacaatttttgacactttgccaccaatgcgctatcaggagaccatgagtgccatcaggacatgggtccagcagtcagaaaccaaactctccatacctcaacttagtgtcaccgactatgaaatcatggagcagagactcggggaattgcaggctttacaaagttctctgcaagagcaacaaagtggcctatactatctcagcaccactgtgaaagagatgtcgaagaaagcgccctctgaaattagccggaaatatcaatcagaatttgaagaaattgagggacgctggaagaagctctcctcccagctggttgagcattgtcaaaagctagaggagcaaatgaataaactccgaaaaattcagaatcacatacaaaccctgaagaaatggatggctgaagttgatgtttttctgaaggaggaatggcctgcccttggggattcagaaattctaaaaaagcagctgaaacagtgcagacttttagtcagtgatattcagacaattcagcccagtctaaacagtgtcaatgaaggtgggcagaagataaagaatgaagcagagccagagtttgcttcgagacttgagacagaactcaaagaacttaacactcagtgggatcacatgtgccaacaggtctatgccagaaaggaggccttgaagggaggtttggagaaaactgtaagcctccagaaagatctatcagagatgcacgaatggatgacacaagctgaagaagagtatcttgagagagattttgaatataaaactccagatgaattacagaaagcagttgaagagatgaagagagctaaagaagaggcccaacaaaaagaagcgaaagtgaaactccttactgagtctgtaaatagtgtcatagctcaagctccacctgtagcacaagaggccttaaaaaaggaacttgaaactctaaccaccaactaccagtggctctgcactaggctgaatgggaaatgcaagactttggaagaagtttgggcatgttggcatgagttattgtcatacttggagaaagcaaacaagtggctaaatgaagtagaatttaaacttaaaaccactgaaaacattcctggcggagctgaggaaatctctgaggtgctagattcacttgaaaatttgatgcgacattcagaggataacccaaatcagattcgcatattggcacagaccctaacagatggcggagtcatggatgagctaatcaatgaggaacttgagacatttaattctcgttggagggaactacatgaagaggctgtaaggaggcaaaagttgcttgaacagagcatccagtctgcccaggagactgaaaaatccttacacttaatccaggagtccctcacattcattgacaagcagttggcagcttatattgcagacaaggtggacgcagctcaaatgcctcaggaagcccagaaaatccaatctgatttgacaagtcatgagatcagtttagaagaaatgaagaaacataatcaggggaaggaggctgcccaaagagtcctgtctcagattgatgttgcacagaaaaaattacaagatgtctccatgaagtttcgattattccagaaaccagccaattttgagcagcgtctacaagaaagtaagatgattttagatgaagtgaagatgcacttgcctgcattggaaacaaagagtgtggaacaggaagtagtacagtcacagctaaatcattgtgtgaacttgtataaaagtctgagtgaagtgaagtctgaagtggaaatggtgataaagactggacgtcagattgtacagaaaaagcagacggaaaatcccaaagaacttgatgaaagagtaacagctttgaaattgcattataatgagctgggagcaaaggtaacagaaagaaagcaacagttggagaaatgcttgaaattgtcccgtaagatgcgaaaggaaatgaatgtcttgacagaatggctggcagctacagatatggaattgacaaagagatcagcagttgaaggaatgcctagtaatttggattctgaagttgcctggggaaaggctactcaaaaagagattgagaaacagaaggtgcacctgaagagtatcacagaggtaggagaggccttgaaaacagttttgggcaagaaggagacgttggtggaagataaactcagtcttctgaatagtaactggatagctgtcacctcccgagcagaagagtggttaaatcttttgttggaataccagaaacacatggaaacttttgaccagaatgtggaccacatcacaaagtggatcattcaggctgacacacttttggatgaatcagagaaaaagaaaccccagcaaaaagaagacgtgcttaagcgtttaaaggcagaactgaatgacatacgcccaaaggtggactctacacgtgaccaagcagcaaacttgatggcaaaccgcggtgaccactgcaggaaattagtagagccccaaatctcagagctcaaccatcgatttgcagccatttcacacagaattaagactggaaaggcctccattcctttgaaggaattggagcagtttaactcagatatacaaaaattgcttgaaccactggaggctgaaattcagcagggggtgaatctgaaagaggaagacttcaataaagatatgaatgaagacaatgagggtactgtaaaagaattgttgcaaagaggagacaacttacaacaaagaatcacagatgagagaaagcgagaggaaataaagataaaacagcagctgttacagacaaaacataatgctctcaaggatttgaggtctcaaagaagaaaaaaggctctagaaatttctcatcagtggtatcagtacaagaggcaggctgatgatctcctgaaatgcttggatgacattgaaaaaaaattagccagcctacctgagcccagagatgaaaggaaaataaaggaaattgatcgggaattgcagaagaagaaagaggagctgaatgcagtgcgtaggcaagctgagggcttgtctgaggatggggccgcaatggcagtggagccaactcagatccagctcagcaagcgctggcgggaaattgagagcaaatttgctcagtttcgaagactcaactttgcacaaattcacactgtccgtgaagaaacgatgatggtgatgactgaagacatgcctttggaaatttcttatgtgccttctacttatttgactgaaatcactcatgtctcacaagccctattagaagtggaacaacttctcaatgctcctgacctctgtgctaaggactttgaagatctctttaagcaagaggagtctctgaagaatataaaagatagtctacaacaaagctcaggtcggattgacattattcatagcaagaagacagcagcattgcaaagtgcaacgcctgtggaaagggtgaagctacaggaagctctctcccagcttgatttccaatgggaaaaagttaacaaaatgtacaaggaccgacaagggcgatttgacagatctgttgagaaatggcggcgttttcattatgatataaagatatttaatcagtggctaacagaagctgaacagtttctcagaaagacacaaattcctgagaattgggaacatgctaaatacaaatggtatcttaaggaactccaggatggcattgggcagcggcaaactgttgtcagaacattgaatgcaactggggaagaaataattcagcaatcctcaaaaacagatgccagtattctacaggaaaaattgggaagcctgaatctgcggtggcaggaggtctgcaaacagctgtcagacagaaaaaagaggctagaagaacaaaagaatatcttgtcagaatttcaaagagatttaaatgaatttgttttatggttggaggaagcagataacattgctagtatcccacttgaacctggaaaagagcagcaactaaaagaaaagcttgagcaagtcaagttactggtggaagagttgcccctgcgccagggaattctcaaacaattaaatgaaactggaggacccgtgcttgtaagtgctcccataagcccagaagagcaagataaacttgaaaataagctcaagcagacaaatctccagtggataaaggtttccagagctttacctgagaaacaaggagaaattgaagctcaaataaaagaccttgggcagcttgaaaaaaagcttgaagaccttgaagagcagttaaatcatctgctgctgtggttatctcctattaggaatcagttggaaatttataaccaaccaaaccaagaaggaccatttgacgttcaggaaactgaaatagcagttcaagctaaacaaccggatgtggaagagattttgtctaaagggcagcatttgtacaaggaaaaaccagccactcagccagtgaagaggaagttagaagatctgagctctgagtggaaggcggtaaaccgtttacttcaagagctgagggcaaagcagcctgacctagctcctggactgaccactattggagcctctcctactcagactgttactctggtgacacaacctgtggttactaaggaaactgccatctccaaactagaaatgccatcttccttgatgttggaggtacctgctctggcagatttcaaccgggcttggacagaacttaccgactggctttctctgcttgatcaagttataaaatcacagagggtgatggtgggtgaccttgaggatatcaacgagatgatcatcaagcagaaggcaacaatgcaggatttggaacagaggcgtccccagttggaagaactcattaccgctgcccaaaatttgaaaaacaagaccagcaatcaagaggctagaacaatcattacggatcgaattgaaagaattcagaatcagtgggatgaagtacaagaacaccttcagaaccggaggcaacagttgaatgaaatgttaaaggattcaacacaatggctggaagctaaggaagaagctgagcaggtcttaggacaggccagagccaagcttgagtcatggaaggagggtccctatacagtagatgcaatccaaaagaaaatcacagaaaccaagcagttggccaaagacctccgccagtggcagacaaatgtagatgtggcaaatgacttggccctgaaacttctccgggattattctgcagatgataccagaaaagtccacatgataacagagaatatcaatgcctcttggagaagcattcataaaagggtgagtgagcgagaggctgctttggaagaaactcatagattactgcaacagttccccctggacctggaaaagtttcttgcctggcttacagaagctgaaacaactgccaatgtcctacaggatgctacccgtaaggaaaggctcctagaagactccaagggagtaaaagagctgatgaaacaatggcaagacctccaaggtgaaattgaagctcacacagatgtttatcacaacctggatgaaaacagccaaaaaatcctgagatccctggaaggttccgatgatgcagtcctgttacaaagacgtttggataacatgaacttcaagtggagtgaacttcggaaaaagtctctcaacattaggtcccatttggaagccagttctgaccagtggaagcgtctgcacctttctctgcaggaacttctggtgtggctacagctgaaagatgatgaattaagccggcaggcacctattggaggcgactttccagcagttcagaagcagaacgatgtacatagggccttcaagagggaattgaaaactaaagaacctgtaatcatgagtactcttgagactgtacgaatatttctgacagagcagcctttggaaggactagagaaactctaccaggagcccagagagctgcctcctgaggagagagcccagaatgtcactcggcttctacgaaagcaggctgaggaggtcaatactgagtgggaaaaattgaacctgcactccgctgactggcagagaaaaatagatgagacccttgaaagactccaggaacttcaagaggccacggatgagctggacctcaagctgcgccaagctgaggtgatcaagggatcctggcagcccgtgggcgatctcctcattgactctctccaagatcacctcgagaaagtcaaggcacttcgaggagaaattgcgcctctgaaagagaacgtgagccacgtcaatgaccttgctcgccagcttaccactttgggcattcagctctcaccgtataacctcagcactctggaagacctgaacaccagatggaagcttctgcaggtggccgtcgaggaccgagtcaggcagctgcatgaagcccacagggactttggtccagcatctcagcactttctttccacgtctgtccagggtccctgggagagagccatctcgccaaacaaagtgccctactatatcaaccacgagactcaaacaacttgctgggaccatcccaaaatgacagagctctaccagtctttagctgacctgaataatgtcagattctcagcttataggactgccatgaaactccgaagactgcagaaggccctttgcttggatctcttgagcctgtcagctgcatgtgatgccttggaccagcacaacctcaagcaaaatgaccagcccatggatatcctgcagattattaattgtttgaccactatttatgaccgcctggagcaagagcacaacaatttggtcaacgtccctctctgcgtggatatgtgtctgaactggctgctgaatgtttatgatacgggacgaacagggaggatccgtgtcctgtcttttaaaactggcatcatttccctgtgtaaagcacatttggaagacaagtacagataccttttcaagcaagtggcaagttcaacaggattttgtgaccagcgcaggctgggcctccttctgcatgattctatccaaattccaagacagttgggtgaagttgcatcctttgggggcagtaacattgagccaagtgtccggagctgcttccaatttgctaataataagccagagatcgaagcggccctcttcctagactggatgagactggaaccccagtccatggtgtggctgcccgtcctgcacagagtggctgctgcagaaactgccaagcatcaggccaaatgtaacatctgcaaagagtgtccaatcattggattcaggtacaggagtctaaagcactttaattatgacatctgccaaagctgctttttttctggtcgagttgcaaaaggccataaaatgcactatcccatggtggaatattgcactccgactacatcaggagaagatgttcgagactttgccaaggtactaaaaaacaaatttcgaaccaaaaggtattttgcgaagcatccccgaatgggctacctgccagtgcagactgtcttagagggggacaacatggaaactcccgttactctgatcaacttctggccagtagattctgcgcctgcctcgtcccctcagctttcacacgatgatactcattcacgcattgaacattatgctagcaggctagcagaaatggaaaacagcaatggatcttatctaaatgatagcatctctcctaatgagagcatagatgatgaacatttgttaatccagcattactgccaaagtttgaaccaggactcccccctgagccagcctcgtagtcctgcccagatcttgatttccttagagagtgaggaaagaggggagctagagagaatcctagcagatcttgaggaagaaaacaggaatctgcaagcagaatatgaccgtctaaagcagcagcacgaacataaaggcctgtccccactgccgtcccctcctgaaatgatgcccacctctccccagagtccccgggatgctgagctcattgctgaggccaagctactgcgtcaacacaaaggccgcctggaagccaggatgcaaatcctggaagaccacaataaacagctggagtcacagttacacaggctaaggcagctgctggagcaaccccaggcagaggccaaagtgaatggcacaacggtgtcctctccttctacctctctacagaggtccgacagcagtcagcctatgctgctccgagtggttggcagtcaaacttcggactccatgggtgaggaagatcttctcagtcctccccaggacacaagcacagggttagaggaggtgatggagcaactcaacaactccttccctagttcaagaggaagaaatacccctggaaagccaatgagagaggacacaatgtaggaagtcttttccacatggcagatgatttgggcagagcgatggagtccttagtatcagtcatgacagatgaagaaggagcagaataaatgttttacaactcctgattcccgcatggtttttataatattcatacaacaaagaggattagacagtaagagtttacaagaaataaatctatatttttgtgaagggtagtggtattatactgtagatttcagtagtttctaagtctgttattgttttgttaacaatggcaggttttacacgtctatgcaattgtacaaaaaagttataagaaaactacatgtaaaatcttgatagctaaataacttgccatttctttatatggaacgcattttgggttgtttaaaaatttataacagttataaagaaagattgtaaactaaagtgtgctttataaaaaaaagttgtttataaaaacccctaaaaacaaaacaaacacacacacacacacatacacacacacacacaaaactttgaggcagcgcattgttttgcatccttttggcgtgatatccatatgaaattcatggctttttctttttttgcatattaaagataagacttcctctaccaccacaccaaatgactactacacactgctcatttgagaactgtcagctgagtggggcaggcttgagttttcatttcatatatctatatgtctataagtatataaatactatagttatatagataaagagatacgaatttctatagactgactttttccattttttaaatgttcatgtcacatcctaatagaaagaaattacttctagtcagtcatccaggcttacctgcttggtctagaatggatttttcccggagccggaagccaggaggaaactacaccacactaaaacattgtctacagctccagatgtttctcattttaaacaactttccactgacaacgaaagtaaagtaaagtattggatttttttaaagggaacatgtgaatgaatacacaggacttattatatcagagtgagtaatcggttggttggttgattgattgattgattgatacattcagcttcctgctgctagcaatgccacgatttagatttaatgatgcttcagtggaaatcaatcagaaggtattctgaccttgtgaacatcagaaggtattttttaactcccaagcagtagcaggacgatgatagggctggagggctatggattcccagcccatccctgtgaaggagtaggccactctttaagtgaaggattggatgattgttcataatacataaagttctctgtaattacaactaaattattatgccctcttctcacagtcaaaaggaactgggtggtttggtttttgttgcttttttagatttattgtcccatgtgggatgagtttttaaatgccacaagacataatttaaaataaataaactttgggaaaaggtgtaaaacagtagccccatcacatttgtgatactgacaggtatcaacccagaagcccatgaactgtgtttccatcctttgcatttctctgcgagtagttccacacaggtttgtaagtaagtaagaaagaaggcaaattgattcaaatgttacaaaaaaacccttcttggtggattagacaggttaaatatataaacaaacaaacaaaaattgctcaaaaaagaggagaaaagctcaagaggaaaagctaaggactggtaggaaaaagctttactctttcatgccattttatttctttttgatttttaaatcattcattcaatagataccaccgtgtgacctataattttgcaaatctgttacctctgacatcaagtgtaattagcttttggagagtgggctgacatcaagtgtaattagcttttggagagtgggttttgtccattattaataattaattaattaacatcaaacacggcttctcatgctatttctacctcactttggttttggggtgttcctgataattgtgcacacctgagttcacagcttcaccacttgtccattgcgttattttctttttcctttataattctttctttttccttcataattttcaaaagaaaacccaaagctctaaggtaacaaattaccaaattacatgaagatttggtttttgtcttgcatttttttcctttatgtgacgctggaccttttctttacccaaggatttttaaaactcagatttaaaacaaggggttactttacatcctactaagaagtttaagtaagtaagtttcattctaaaatcagaggtaaatagagtgcataaataattttgttttaatctttttgtttttcttttagacacattagctctggagtgagtctgtcataatatttgaacaaaaattgagagctttattgctgcattttaagcataattaatttggacattatttcgtgttgtgttctttataaccaccaagtattaaactgtaaatcataatgtaactgaagcataaacatcacatggcatgttttgtcattgttttcaggtactgagttcttacttgagtatcataatatattgtgttttaacaccaacactgtaacatttacgaattatttttttaaacttcagttttactgcattttcacaacatatcagacttcaccaaatatatgccttactattgtattatagtactgctttactgtgtatctcaataaagcacgcagttatgttac

SEQ ID NO: 11 - protein, 3681 aa, Homo sapiens
MSEVSSDEREDVQKKTFTKWVNAQFSKFGKQHIENLFSDLQDGRRLLDLLEGLTGQKLPKEKGSTRVHALNNVNKALRVLQNNNVDLVNIGSTDIVDGNHKLTLGLIWNIILHWQVKNVMKNIMAGLQQTNSEKILLSWVRQSTRNYPQVNVINFTTSWSDGLALNALIHSHRPDLFDWNSVVCQQSATQRLEHAFNIARYQLGIEKLLDPEDVDTTYPDKKSILMYITSLFQVLPQQVSIEAIQEVEMLPRPPKVTKEEHFQLHHQMHYSQQITVSLAQGYERTSSPKPRFKSYAYTQAAYVTTSDPTRSPFPSQHLEAPEDKSFGSSLMESEVNLDRYQTALEEVLSWLLSAEDTLQAQGEISNDVEVVKDQFHTHEGYMMDLTAHQGRVGNILQLGSKLIGTGKLSEDEETEVQEQMNLLNSRWECLRVASMEKQSNLHRVLMDLQNQKLKELNDWLTKTEERTRKMEEEPLGPDLEDLKRQVQQHKVLQEDLEQEQVRVNSLTHMVVVVDESSGDHATAALEEQLKVLGDRWANICRWTEDRWVLLQDILLKWQRLTEEQCLFSAWLSEKEDAVNKIHTTGFKDQNEMLSSLQKLAVLKADLEKKKQSMGKLYSLKQDLLSTLKNKSVTQKTEAWLDNFARCWDNLVQKLEKSTAQISQAVTTTQPSLTQTTVMETVTTVTTREQILVKHAQEELPPPPPQKKRQITVDSEIRKRLDVDITELHSWITRSEAVLQSPEFAIFRKEGNFSDLKEKVNAIEREKAEKFRKLQDASRSAQALVEQMVNEGVNADSIKQASEQLNSRWIEFCQLLSERLNWLEYQNNIIAFYNQLQQLEQMTTTAENWLKIQPTTPSEPTAIKSQLKICKDEVNRLSGLQPQIERLKIQSIALKEKGQGPMFLDADFVAFTNHFKQVFSDVQAREKELQTIFDTLPPMRYQETMSAIRTWVQQSETKLSIPQLSVTDYEIMEQRLGELQALQSSLQEQQSGLYYLSTTVKEMSKKAPSEISRKYQSEFEEIEGRWKKLSSQLVEHCQKLEEQMNKLRKIQNHIQTLKKWMAEVDVFLKEEWPALGDSEILKKQLKQCRLLVSDIQTIQPSLNSVNEGGQKIKNEAEPEFASRLETELKELNTQWDHMCQQVYARKEALKGGLEKTVSLQKDLSEMHEWMTQAEEEYLERDFEYKTPDELQKAVEEMKRAKEEAQQKEAKVKLLTESVNSVIAQAPPVAQEALKKELETLTTNYQWLCTRLNGKCKTLEEVWACWHELLSYLEKANKWLNEVEFKLKTTENIPGGAEEISEVLDSLENLMRHSEDNPNQIRILAQTLTDGGVMDELINEELETFNSRWRELHEEAVRRQKLLEQSIQSAQETEKSLHLIQESLTFIDKQLAAYIADKVDAAQMPQEAQKIQSDLTSHEISLEEMKKHNQGKEAAQRVLSQIDVAQKKLQDVSMKFRLFQKPANFEQRLQESKMILDEVKMHLPALETKSVEQEVVQSQLNHCVNLYKSLSEVKSEVEMVIKTGRQIVQKKQTENPKELDERVTALKLHYNELGAKVTERKQQLEKCLKLSRKMRKEMNVLTEWLAATDMELTKRSAVEGMPSNLDSEVAWGKATQKEIEKQKVHLKSITEVGEALKTVLGKKETLVEDKLSLLNSNWIAVTSRAEEWLNLLLEYQKHMETFDQNVDHITKWIIQADTLLDESEKKKPQQKEDVLKRLKAELNDIRPKVDSTRDQAANLMANRGDHCRKLVEPQISELNHRFAAISHRIKTGKASIPLKELEQFNSDIQKLLEPLEAEIQQGVNLKEEDFNKDMNEDNEGTVKELLQRGDNLQQRITDERKREEIKIKQQLLQTKHNALKDLRSQRRKKALEISHQWYQYKRQADDLLKCLDDIEKKLASLPEPRDERKIKEIDRELQKKKEELNAVRRQAEGLSEDGAAMAVEPTQIQLSKRWREIESKFAQFRRLNFAQIHTVREETMMVMTEDMPLEISYVPSTYLTEITHVSQALLEVEQLLNAPDLCAKDFEDLFKQEESLKNIKDSLQQSSGRIDIIHSKKTAALQSATPVERVKLQEALSQLDFQWEKVNKMYKDRQGRFDRSVEKWRRFHYDIKIFNQWLTEAEQFLRKTQIPENWEHAKYKWYLKELQDGIGQRQTVVRTLNATGEEIIQQSSKTDASILQEKLGSLNLRWQEVCKQLSDRKKRLEEQKNILSEFQRDLNEFVLWLEEADNIASIPLEPGKEQQLKEKLEQVKLLVEELPLRQGILKQLNETGGPVLVSAPISPEEQDKLENKLKQTNLQWIKVSRALPEKQGEIEAQIKDLGQLEKKLEDLEEQLNHLLLWLSPIRNQLEIYNQPNQEGPFDVQETEIAVQAKQPDVEEILSKGQHLYKEKPATQPVKRKLEDLSSEWKAVNRLLQELRAKQPDLAPGLTTIGASPTQTVTLVTQPVVTKETAISKLEMPSSLMLEVPALADFNRAWTELTDWLSLLDQVIKSQRVMVGDLEDINEMIIKQKATMQDLEQRRPQLEELITAAQNLKNKTSNQEARTIITDRIERIQNQWDEVQEHLQNRRQQLNEMLKDSTQWLEAKEEAEQVLGQARAKLESWKEGPYTVDAIQKKITETKQLAKDLRQWQTNVDVANDLALKLLRDYSADDTRKVHMITENINASWRSIHKRVSEREAALEETHRLLQQFPLDLEKFLAWLTEAETTANVLQDATRKERLLEDSKGVKELMKQWQDLQGEIEAHTDVYHNLDENSQKILRSLEGSDDAVLLQRRLDNMNFKWSELRKKSLNIRSHLEASSDQWKRLHLSLQELLVWLQLKDDELSRQAPIGGDFPAVQKQNDVHRAFKRELKTKEPVIMSTLETVRIFLTEQPLEGLEKLYQEPRELPPEERAQNVTRLLRKQAEEVNTEWEKLNLHSADWQRKIDETLERLQELQEATDELDLKLRQAEVIKGSWQPVGDLLIDSLQDHLEKVKALRGEIAPLKENVSHVNDLARQLTTLGIQLSPYNLSTLEDLNTRWKLLQVAVEDRVRQLHEAHRDFGPASQHFLSTSVQGPWERAISPNKVPYYINHETQTTCWDHPKMTELYQSLADLNNVRFSAYRTAMKLRRLQKALCLDLLSLSAACDALDQHNLKQNDQPMDILQIINCLTTIYDRLEQEHNNLVNVPLCVDMCLNWLLNVYDTGRTGRIRVLSFKTGIISLCKAHLEDKYRYLFKQVASSTGFCDQRRLGLLLHDSIQIPRQLGEVASFGGSNIEPSVRSCFQFANNKPEIEAALFLDWMRLEPQSMVWLPVLHRVAAAETAKHQAKCNICKECPIIGFRYRSLKHFNYDICQSCFFSGRVAKGHKMHYPMVEYCTPTTSGEDVRDFAKVLKNKFRTKRYFAKHPRMGYLPVQTVLEGDNMETPVTLINFWPVDSAPASSPQLSHDDTHSRIEHYASRLAEMENSNGSYLNDSISPNESIDDEHLLIQHYCQSLNQDSPLSQPRSPAQILISLESEERGELERILADLEEENRNLQAEYDRLKQQHEHKGLSPLPSPPEMMPTSPQSPRDAELIAEAKLLRQHKGRLEARMQILEDHNKQLESQLHRLRQLLEQPQAEAKVNGTTVSSPSTSLQRSDSSQPMLLRVVGSQTSDSMGEEDLLSPPQDTSTGLEEVMEQLNNSFPSSRGRNTPGKPMREDTM

SEQ ID NO: 12 - DNA, 9771 bp, Homo sapiens
taatgagatcaggaggaacattcgacctgagaaagacagattgcaatgactgagatgattttgctaattttttttccagcctatttccttaatgctgtaaggaggcaaaagttgcttgaacagagcatccagtctgcccaggagactgaaaaatccttacacttaatccaggagtccctcacattcattgacaagcagttggcagcttatattgcagacaaggtggacgcagctcaaatgcctcaggaagcccagaaaatccaatctgatttgacaagtcatgagatcagtttagaagaaatgaagaaacataatcaggggaaggaggctgcccaaagagtcctgtctcagattgatgttgcacagaaaaaattacaagatgtctccatgaagtttcgattattccagaaaccagccaattttgagcagcgtctacaagaaagtaagatgattttagatgaagtgaagatgcacttgcctgcattggaaacaaagagtgtggaacaggaagtagtacagtcacagctaaatcattgtgtgaacttgtataaaagtctgagtgaagtgaagtctgaagtggaaatggtgataaagactggacgtcagattgtacagaaaaagcagacggaaaatcccaaagaacttgatgaaagagtaacagctttgaaattgcattataatgagctgggagcaaaggtaacagaaagaaagcaacagttggagaaatgcttgaaattgtcccgtaagatgcgaaaggaaatgaatgtcttgacagaatggctggcagctacagatatggaattgacaaagagatcagcagttgaaggaatgcctagtaatttggattctgaagttgcctggggaaaggctactcaaaaagagattgagaaacagaaggtgcacctgaagagtatcacagaggtaggagaggccttgaaaacagttttgggcaagaaggagacgttggtggaagataaactcagtcttctgaatagtaactggatagctgtcacctcccgagcagaagagtggttaaatcttttgttggaataccagaaacacatggaaacttttgaccagaatgtggaccacatcacaaagtggatcattcaggctgacacacttttggatgaatcagagaaaaagaaaccccagcaaaaagaagacgtgcttaagcgtttaaaggcagaactgaatgacatacgcccaaaggtggactctacacgtgaccaagcagcaaacttgatggcaaaccgcggtgaccactgcaggaaattagtagagccccaaatctcagagctcaaccatcgatttgcagccatttcacacagaattaagactggaaaggcctccattcctttgaaggaattggagcagtttaactcagatatacaaaaattgcttgaaccactggaggctgaaattcagcagggggtgaatctgaaagaggaagacttcaataaagatatgaatgaagacaatgagggtactgtaaaagaattgttgcaaagaggagacaacttacaacaaagaatcacagatgagagaaagcgagaggaaataaagataaaacagcagctgttacagacaaaacataatgctctcaaggatttgaggtctcaaagaagaaaaaaggctctagaaatttctcatcagtggtatcagtacaagaggcaggctgatgatctcctgaaatgcttggatgacattgaaaaaaaattagccagcctacctgagcccagagatgaaaggaaaataaaggaaattgatcgggaattgcagaagaagaaagaggagctgaatgcagtgcgtaggcaagctgagggcttgtctgaggatggggccgcaatggcagtggagccaactcagatccagctcagcaagcgctggcgggaaattgagagcaaatttgctcagtttcgaagactcaactttgcacaaattcacactgtccgtgaagaaacgatgatggtgatgactgaagacatgcctttggaaatttcttatgtgccttctacttatttgactgaaatcactcatgtctcacaagccctattagaagtggaacaacttctcaatgctcctgacctctgtgctaaggactttgaagatctctttaagcaagaggagtctctgaagaatataaaagatagtctacaacaaagctcaggtcggattgacattattcatagcaagaagacagcagcattgcaaagtgcaacgcctgtggaaagggtgaagctacaggaagctctctcccagcttgatttccaatgggaaaaagttaacaaaatgtacaaggaccgacaagggcgatttgacagatctgttgagaaatggcggcgttttcattatgatataaagatatttaatcagtggctaacagaagctgaacagtttctcagaaagacacaaattcctgagaattgggaacatgctaaatacaaatggtatcttaaggaactccaggatggcattgggcagcggcaaactgttgtcagaacattgaatgcaactggggaagaaataattcagcaatcctcaaaaacagatgccagtattctacaggaaaaattgggaagcctgaatctgcggtggcaggaggtctgcaaacagctgtcagacagaaaaaagaggctagaagaacaaaagaatatcttgtcagaatttcaaagagatttaaatgaatttgttttatggttggaggaagcagataacattgctagtatcccacttgaacctggaaaagagcagcaactaaaagaaaagcttgagcaagtcaagttactggtggaagagttgcccctgcgccagggaattctcaaacaattaaatgaaactggaggacccgtgcttgtaagtgctcccataagcccagaagagcaagataaacttgaaaataagctcaagcagacaaatctccagtggataaaggtttccagagctttacctgagaaacaaggagaaattgaagctcaaataaaagaccttgggcagcttgaaaaaaagcttgaagaccttgaagagcagttaaatcatctgctgctgtggttatctcctattaggaatcagttggaaatttataaccaaccaaaccaagaaggaccatttgacgttcaggaaactgaaatagcagttcaagctaaacaaccggatgtggaagagattttgtctaaagggcagcatttgtacaaggaaaaaccagccactcagccagtgaagaggaagttagaagatctgagctctgagtggaaggcggtaaaccgtttacttcaagagctgagggcaaagcagcctgacctagctcctggactgaccactattggagcctctcctactcagactgttactctggtgacacaacctgtggttactaaggaaactgccatctccaaactagaaatgccatcttccttgatgttggaggtacctgctctggcagatttcaaccgggcttggacagaacttaccgactggctttctctgcttgatcaagttataaaatcacagagggtgatggtgggtgaccttgaggatatcaacgagatgatcatcaagcagaaggcaacaatgcaggatttggaacagaggcgtccccagttggaagaactcattaccgctgcccaaaatttgaaaaacaagaccagcaatcaagaggctagaacaatcattacggatcgaattgaaagaattcagaatcagtgggatgaagtacaagaacaccttcagaaccggaggcaacagttgaatgaaatgttaaaggattcaacacaatggctggaagctaaggaagaagctgagcaggtcttaggacaggccagagccaagcttgagtcatggaaggagggtccctatacagtagatgcaatccaaaagaaaatcacagaaaccaagcagttggccaaagacctccgccagtggcagacaaatgtagatgtggcaaatgacttggccctgaaacttctccgggattattctgcagatgataccagaaaagtccacatgataacagagaatatcaatgcctcttggagaagcattcataaaagggtgagtgagcgagaggctgctttggaagaaactcatagattactgcaacagttccccctggacctggaaaagtttcttgcctggcttacagaagctgaaacaactgccaatgtcctacaggatgctacccgtaaggaaaggctcctagaagactccaagggagtaaaagagctgatgaaacaatggcaagacctccaaggtgaaattgaagctcacacagatgtttatcacaacctggatgaaaacagccaaaaaatcctgagatccctggaaggttccgatgatgcagtcctgttacaaagacgtttggataacatgaacttcaagtggagtgaacttcggaaaaagtctctcaacattaggtcccatttggaagccagttctgaccagtggaagcgtctgcacctttctctgcaggaacttctggtgtggctacagctgaaagatgatgaattaagccggcaggcacctattggaggcgactttccagcagttcagaagcagaacgatgtacatagggccttcaagagggaattgaaaactaaagaacctgtaatcatgagtactcttgagactgtacgaatatttctgacagagcagcctttggaaggactagagaaactctaccaggagcccagagagctgcctcctgaggagagagcccagaatgtcactcggcttctacgaaagcaggctgaggaggtcaatactgagtgggaaaaattgaacctgcactccgctgactggcagagaaaaatagatgagacccttgaaagactccaggaacttcaagaggccacggatgagctggacctcaagctgcgccaagctgaggtgatcaagggatcctggcagcccgtgggcgatctcctcattgactctctccaagatcacctcgagaaagtcaaggcacttcgaggagaaattgcgcctctgaaagagaacgtgagccacgtcaatgaccttgctcgccagcttaccactttgggcattcagctctcaccgtataacctcagcactctggaagacctgaacaccagatggaagcttctgcaggtggccgtcgaggaccgagtcaggcagctgcatgaagcccacagggactttggtccagcatctcagcactttctttccacgtctgtccagggtccctgggagagagccatctcgccaaacaaagtgccctactatatcaaccacgagactcaaacaacttgctgggaccatcccaaaatgacagagctctaccagtctttagctgacctgaataatgtcagattctcagcttataggactgccatgaaactccgaagactgcagaaggccctttgcttggatctcttgagcctgtcagctgcatgtgatgccttggaccagcacaacctcaagcaaaatgaccagcccatggatatcctgcagattattaattgtttgaccactatttatgaccgcctggagcaagagcacaacaatttggtcaacgtccctctctgcgtggatatgtgtctgaactggctgctgaatgtttatgatacgggacgaacagggaggatccgtgtcctgtcttttaaaactggcatcatttccctgtgtaaagcacatttggaagacaagtacagataccttttcaagcaagtggcaagttcaacaggattttgtgaccagcgcaggctgggcctccttctgcatgattctatccaaattccaagacagttgggtgaagttgcatcctttgggggcagtaacattgagccaagtgtccggagctgcttccaatttgctaataataagccagagatcgaagcggccctcttcctagactggatgagactggaaccccagtccatggtgtggctgcccgtcctgcacagagtggctgctgcagaaactgccaagcatcaggccaaatgtaacatctgcaaagagtgtccaatcattggattcaggtacaggagtctaaagcactttaattatgacatctgccaaagctgctttttttctggtcgagttgcaaaaggccataaaatgcactatcccatggtggaatattgcactccgactacatcaggagaagatgttcgagactttgccaaggtactaaaaaacaaatttcgaaccaaaaggtattttgcgaagcatccccgaatgggctacctgccagtgcagactgtcttagagggggacaacatggaaactcccgttactctgatcaacttctggccagtagattctgcgcctgcctcgtcccctcagctttcacacgatgatactcattcacgcattgaacattatgctagcaggctagcagaaatggaaaacagcaatggatcttatctaaatgatagcatctctcctaatgagagcatagatgatgaacatttgttaatccagcattactgccaaagtttgaaccaggactcccccctgagccagcctcgtagtcctgcccagatcttgatttccttagagagtgaggaaagaggggagctagagagaatcctagcagatcttgaggaagaaaacaggaatctgcaagcagaatatgaccgtctaaagcagcagcacgaacataaaggcctgtccccactgccgtcccctcctgaaatgatgcccacctctccccagagtccccgggatgctgagctcattgctgaggccaagctactgcgtcaacacaaaggccgcctggaagccaggatgcaaatcctggaagaccacaataaacagctggagtcacagttacacaggctaaggcagctgctggagcaaccccaggcagaggccaaagtgaatggcacaacggtgtcctctccttctacctctctacagaggtccgacagcagtcagcctatgctgctccgagtggttggcagtcaaacttcggactccatgggtgaggaagatcttctcagtcctccccaggacacaagcacagggttagaggaggtgatggagcaactcaacaactccttccctagttcaagaggaagaaatacccctggaaagccaatgagagaggacacaatgtaggaagtcttttccacatggcagatgatttgggcagagcgatggagtccttagtatcagtcatgacagatgaagaaggagcagaataaatgttttacaactcctgattcccgcatggtttttataatattcatacaacaaagaggattagacagtaagagtttacaagaaataaatctatatttttgtgaagggtagtggtattatactgtagatttcagtagtttctaagtctgttattgttttgttaacaatggcaggttttacacgtctatgcaattgtacaaaaaagttataagaaaactacatgtaaaatcttgatagctaaataacttgccatttctttatatggaacgcattttgggttgtttaaaaatttataacagttataaagaaagattgtaaactaaagtgtgctttataaaaaaaagttgtttataaaaacccctaaaaacaaaacaaacacacacacacacacatacacacacacacacaaaactttgaggcagcgcattgttttgcatccttttggcgtgatatccatatgaaattcatggctttttctttttttgcatattaaagataagacttcctctaccaccacaccaaatgactactacacactgctcatttgagaactgtcagctgagtggggcaggcttgagttttcatttcatatatctatatgtctataagtatataaatactatagttatatagataaagagatacgaatttctatagactgactttttccattttttaaatgttcatgtcacatcctaatagaaagaaattacttctagtcagtcatccaggcttacctgcttggtctagaatggatttttcccggagccggaagccaggaggaaactacaccacactaaaacattgtctacagctccagatgtttctcattttaaacaactttccactgacaacgaaagtaaagtaaagtattggatttttttaaagggaacatgtgaatgaatacacaggacttattatatcagagtgagtaatcggttggttggttgattgattgattgattgatacattcagcttcctgctgctagcaatgccacgatttagatttaatgatgcttcagtggaaatcaatcagaaggtattctgaccttgtgaacatcagaaggtattttttaactcccaagcagtagcaggacgatgatagggctggagggctatggattcccagcccatccctgtgaaggagtaggccactctttaagtgaaggattggatgattgttcataatacataaagttctctgtaattacaactaaattattatgccctcttctcacagtcaaaaggaactgggtggtttggtttttgttgcttttttagatttattgtcccatgtgggatgagtttttaaatgccacaagacataatttaaaataaataaactttgggaaaaggtgtaaaacagtagccccatcacatttgtgatactgacaggtatcaacccagaagcccatgaactgtgtttccatcctttgcatttctctgcgagtagttccacacaggtttgtaagtaagtaagaaagaaggcaaattgattcaaatgttacaaaaaaacccttcttggtggattagacaggttaaatatataaacaaacaaacaaaaattgctcaaaaaagaggagaaaagctcaagaggaaaagctaaggactggtaggaaaaagctttactctttcatgccattttatttctttttgatttttaaatcattcattcaatagataccaccgtgtgacctataattttgcaaatctgttacctctgacatcaagtgtaattagcttttggagagtgggctgacatcaagtgtaattagcttttggagagtgggttttgtccattattaataattaattaattaacatcaaacacggcttctcatgctatttctacctcactttggttttggggtgttcctgataattgtgcacacctgagttcacagcttcaccacttgtccattgcgttattttctttttcctttataattctttctttttccttcataattttcaaaagaaaacccaaagctctaaggtaacaaattaccaaattacatgaagatttggtttttgtcttgcatttttttcctttatgtgacgctggaccttttctttacccaaggatttttaaaactcagatttaaaacaaggggttactttacatcctactaagaagtttaagtaagtaagtttcattctaaaatcagaggtaaatagagtgcataaataattttgttttaatctttttgtttttcttttagacacattagctctggagtgagtctgtcataatatttgaacaaaaattgagagctttattgctgcattttaagcataattaatttggacattatttcgtgttgtgttctttataaccaccaagtattaaactgtaaatcataatgtaactgaagcataaacatcacatggcatgttttgtcattgttttcaggtactgagttcttacttgagtatcataatatattgtgttttaacaccaacactgtaacatttacgaattatttttttaaacttcagttttactgcattttcacaacatatcagacttcaccaaatatatgccttactattgtattatagtactgctttactgtgtatctcaataaagcacgcagttatgttac

SEQ ID NO: 13 - protein, 2344 aa, Homo sapiens
MTEMILLIFFPAYFLNAVRRQKLLEQSIQSAQETEKSLHLIQESLTFIDKQLAAYIADKVDAAQMPQEAQKIQSDLTSHEISLEEMKKHNQGKEAAQRVLSQIDVAQKKLQDVSMKFRLFQKPANFEQRLQESKMILDEVKMHLPALETKSVEQEVVQSQLNHCVNLYKSLSEVKSEVEMVIKTGRQIVQKKQTENPKELDERVTALKLHYNELGAKVTERKQQLEKCLKLSRKMRKEMNVLTEWLAATDMELTKRSAVEGMPSNLDSEVAWGKATQKEIEKQKVHLKSITEVGEALKTVLGKKETLVEDKLSLLNSNWIAVTSRAEEWLNLLLEYQKHMETFDQNVDHITKWIIQADTLLDESEKKKPQQKEDVLKRLKAELNDIRPKVDSTRDQAANLMANRGDHCRKLVEPQISELNHRFAAISHRIKTGKASIPLKELEQFNSDIQKLLEPLEAEIQQGVNLKEEDFNKDMNEDNEGTVKELLQRGDNLQQRITDERKREEIKIKQQLLQTKHNALKDLRSQRRKKALEISHQWYQYKRQADDLLKCLDDIEKKLASLPEPRDERKIKEIDRELQKKKEELNAVRRQAEGLSEDGAAMAVEPTQIQLSKRWREIESKFAQFRRLNFAQIHTVREETMMVMTEDMPLEISYVPSTYLTEITHVSQALLEVEQLLNAPDLCAKDFEDLFKQEESLKNIKDSLQQSSGRIDIIHSKKTAALQSATPVERVKLQEALSQLDFQWEKVNKMYKDRQGRFDRSVEKWRRFHYDIKIFNQWLTEAEQFLRKTQIPENWEHAKYKWYLKELQDGIGQRQTVVRTLNATGEEIIQQSSKTDASILQEKLGSLNLRWQEVCKQLSDRKKRLEEQKNILSEFQRDLNEFVLWLEEADNIASIPLEPGKEQQLKEKLEQVKLLVEELPLRQGILKQLNETGGPVLVSAPISPEEQDKLENKLKQTNLQWIKVSRALPEKQGEIEAQIKDLGQLEKKLEDLEEQLNHLLLWLSPIRNQLEIYNQPNQEGPFDVQETEIAVQAKQPDVEEILSKGQHLYKEKPATQPVKRKLEDLSSEWKAVNRLLQELRAKQPDLAPGLTTIGASPTQTVTLVTQPVVTKETAISKLEMPSSLMLEVPALADFNRAWTELTDWLSLLDQVIKSQRVMVGDLEDINEMIIKQKATMQDLEQRRPQLEELITAAQNLKNKTSNQEARTIITDRIERIQNQWDEVQEHLQNRRQQLNEMLKDSTQWLEAKEEAEQVLGQARAKLESWKEGPYTVDAIQKKITETKQLAKDLRQWQTNVDVANDLALKLLRDYSADDTRKVHMITENINASWRSIHKRVSEREAALEETHRLLQQFPLDLEKFLAWLTEAETTANVLQDATRKERLLEDSKGVKELMKQWQDLQGEIEAHTDVYHNLDENSQKILRSLEGSDDAVLLQRRLDNMNFKWSELRKKSLNIRSHLEASSDQWKRLHLSLQELLVWLQLKDDELSRQAPIGGDFPAVQKQNDVHRAFKRELKTKEPVIMSTLETVRIFLTEQPLEGLEKLYQEPRELPPEERAQNVTRLLRKQAEEVNTEWEKLNLHSADWQRKIDETLERLQELQEATDELDLKLRQAEVIKGSWQPVGDLLIDSLQDHLEKVKALRGEIAPLKENVSHVNDLARQLTTLGIQLSPYNLSTLEDLNTRWKLLQVAVEDRVRQLHEAHRDFGPASQHFLSTSVQGPWERAISPNKVPYYINHETQTTCWDHPKMTELYQSLADLNNVRFSAYRTAMKLRRLQKALCLDLLSLSAACDALDQHNLKQNDQPMDILQIINCLTTIYDRLEQEHNNLVNVPLCVDMCLNWLLNVYDTGRTGRIRVLSFKTGIISLCKAHLEDKYRYLFKQVASSTGFCDQRRLGLLLHDSIQIPRQLGEVASFGGSNIEPSVRSCFQFANNKPEIEAALFLDWMRLEPQSMVWLPVLHRVAAAETAKHQAKCNICKECPIIGFRYRSLKHFNYDICQSCFFSGRVAKGHKMHYPMVEYCTPTTSGEDVRDFAKVLKNKFRTKRYFAKHPRMGYLPVQTVLEGDNMETPVTLINFWPVDSAPASSPQLSHDDTHSRIEHYASRLAEMENSNGSYLNDSISPNESIDDEHLLIQHYCQSLNQDSPLSQPRSPAQILISLESEERGELERILADLEEENRNLQAEYDRLKQQHEHKGLSPLPSPPEMMPTSPQSPRDAELIAEAKLLRQHKGRLEARMQILEDHNKQLESQLHRLRQLLEQPQAEAKVNGTTVSSPSTSLQRSDSSQPMLLRVVGSQTSDSMGEEDLLSPPQDTSTGLEEVMEQLNNSFPSSRGRNTPGKPMREDTM

SEQ ID NO: 14 - DNA, 9914 bp, Homo sapiens
taatgagatcaggaggaacattcgacctgagaaagacagattgcaatgactgagatgattttgctaattttttttccagcctatttccttaatgtacgtgatattgtgattgattttcatgcagagatccctgatcctatagttttgtttgctatttatttttctccttcacattttttttctatcaacagagctgaatgagtgccaggaagctgcgaaatctgtcttacaaaaaggctgtaaggaggcaaaagttgcttgaacagagcatccagtctgcccaggagactgaaaaatccttacacttaatccaggagtccctcacattcattgacaagcagttggcagcttatattgcagacaaggtggacgcagctcaaatgcctcaggaagcccagaaaatccaatctgatttgacaagtcatgagatcagtttagaagaaatgaagaaacataatcaggggaaggaggctgcccaaagagtcctgtctcagattgatgttgcacagaaaaaattacaagatgtctccatgaagtttcgattattccagaaaccagccaattttgagcagcgtctacaagaaagtaagatgattttagatgaagtgaagatgcacttgcctgcattggaaacaaagagtgtggaacaggaagtagtacagtcacagctaaatcattgtgtgaacttgtataaaagtctgagtgaagtgaagtctgaagtggaaatggtgataaagactggacgtcagattgtacagaaaaagcagacggaaaatcccaaagaacttgatgaaagagtaacagctttgaaattgcattataatgagctgggagcaaaggtaacagaaagaaagcaacagttggagaaatgcttgaaattgtcccgtaagatgcgaaaggaaatgaatgtcttgacagaatggctggcagctacagatatggaattgacaaagagatcagcagttgaaggaatgcctagtaatttggattctgaagttgcctggggaaaggctactcaaaaagagattgagaaacagaaggtgcacctgaagagtatcacagaggtaggagaggccttgaaaacagttttgggcaagaaggagacgttggtggaagataaactcagtcttctgaatagtaactggatagctgtcacctcccgagcagaagagtggttaaatcttttgttggaataccagaaacacatggaaacttttgaccagaatgtggaccacatcacaaagtggatcattcaggctgacacacttttggatgaatcagagaaaaagaaaccccagcaaaaagaagacgtgcttaagcgtttaaaggcagaactgaatgacatacgcccaaaggtggactctacacgtgaccaagcagcaaacttgatggcaaaccgcggtgaccactgcaggaaattagtagagccccaaatctcagagctcaaccatcgatttgcagccatttcacacagaattaagactggaaaggcctccattcctttgaaggaattggagcagtttaactcagatatacaaaaattgcttgaaccactggaggctgaaattcagcagggggtgaatctgaaagaggaagacttcaataaagatatgaatgaagacaatgagggtactgtaaaagaattgttgcaaagaggagacaacttacaacaaagaatcacagatgagagaaagcgagaggaaataaagataaaacagcagctgttacagacaaaacataatgctctcaaggatttgaggtctcaaagaagaaaaaaggctctagaaatttctcatcagtggtatcagtacaagaggcaggctgatgatctcctgaaatgcttggatgacattgaaaaaaaattagccagcctacctgagcccagagatgaaaggaaaataaaggaaattgatcgggaattgcagaagaagaaagaggagctgaatgcagtgcgtaggcaagctgagggcttgtctgaggatggggccgcaatggcagtggagccaactcagatccagctcagcaagcgctggcgggaaattgagagcaaatttgctcagtttcgaagactcaactttgcacaaattcacactgtccgtgaagaaacgatgatggtgatgactgaagacatgcctttggaaatttcttatgtgccttctacttatttgactgaaatcactcatgtctcacaagccctattagaagtggaacaacttctcaatgctcctgacctctgtgctaaggactttgaagatctctttaagcaagaggagtctctgaagaatataaaagatagtctacaacaaagctcaggtcggattgacattattcatagcaagaagacagcagcattgcaaagtgcaacgcctgtggaaagggtgaagctacaggaagctctctcccagcttgatttccaatgggaaaaagttaacaaaatgtacaaggaccgacaagggcgatttgacagatctgttgagaaatggcggcgttttcattatgatataaagatatttaatcagtggctaacagaagctgaacagtttctcagaaagacacaaattcctgagaattgggaacatgctaaatacaaatggtatcttaaggaactccaggatggcattgggcagcggcaaactgttgtcagaacattgaatgcaactggggaagaaataattcagcaatcctcaaaaacagatgccagtattctacaggaaaaattgggaagcctgaatctgcggtggcaggaggtctgcaaacagctgtcagacagaaaaaagaggctagaagaacaaaagaatatcttgtcagaatttcaaagagatttaaatgaatttgttttatggttggaggaagcagataacattgctagtatcccacttgaacctggaaaagagcagcaactaaaagaaaagcttgagcaagtcaagttactggtggaagagttgcccctgcgccagggaattctcaaacaattaaatgaaactggaggacccgtgcttgtaagtgctcccataagcccagaagagcaagataaacttgaaaataagctcaagcagacaaatctccagtggataaaggtttccagagctttacctgagaaacaaggagaaattgaagctcaaataaaagaccttgggcagcttgaaaaaaagcttgaagaccttgaagagcagttaaatcatctgctgctgtggttatctcctattaggaatcagttggaaatttataaccaaccaaaccaagaaggaccatttgacgttcaggaaactgaaatagcagttcaagctaaacaaccggatgtggaagagattttgtctaaagggcagcatttgtacaaggaaaaaccagccactcagccagtgaagaggaagttagaagatctgagctctgagtggaaggcggtaaaccgtttacttcaagagctgagggcaaagcagcctgacctagctcctggactgaccactattggagcctctcctactcagactgttactctggtgacacaacctgtggttactaaggaaactgccatctccaaactagaaatgccatcttccttgatgttggaggtacctgctctggcagatttcaaccgggcttggacagaacttaccgactggctttctctgcttgatcaagttataaaatcacagagggtgatggtgggtgaccttgaggatatcaacgagatgatcatcaagcagaaggcaacaatgcaggatttggaacagaggcgtccccagttggaagaactcattaccgctgcccaaaatttgaaaaacaagaccagcaatcaagaggctagaacaatcattacggatcgaattgaaagaattcagaatcagtgggatgaagtacaagaacaccttcagaaccggaggcaacagttgaatgaaatgttaaaggattcaacacaatggctggaagctaaggaagaagctgagcaggtcttaggacaggccagagccaagcttgagtcatggaaggagggtccctatacagtagatgcaatccaaaagaaaatcacagaaaccaagcagttggccaaagacctccgccagtggcagacaaatgtagatgtggcaaatgacttggccctgaaacttctccgggattattctgcagatgataccagaaaagtccacatgataacagagaatatcaatgcctcttggagaagcattcataaaagggtgagtgagcgagaggctgctttggaagaaactcatagattactgcaacagttccccctggacctggaaaagtttcttgcctggcttacagaagctgaaacaactgccaatgtcctacaggatgctacccgtaaggaaaggctcctagaagactccaagggagtaaaagagctgatgaaacaatggcaagacctccaaggtgaaattgaagctcacacagatgtttatcacaacctggatgaaaacagccaaaaaatcctgagatccctggaaggttccgatgatgcagtcctgttacaaagacgtttggataacatgaacttcaagtggagtgaacttcggaaaaagtctctcaacattaggtcccatttggaagccagttctgaccagtggaagcgtctgcacctttctctgcaggaacttctggtgtggctacagctgaaagatgatgaattaagccggcaggcacctattggaggcgactttccagcagttcagaagcagaacgatgtacatagggccttcaagagggaattgaaaactaaagaacctgtaatcatgagtactcttgagactgtacgaatatttctgacagagcagcctttggaaggactagagaaactctaccaggagcccagagagctgcctcctgaggagagagcccagaatgtcactcggcttctacgaaagcaggctgaggaggtcaatactgagtgggaaaaattgaacctgcactccgctgactggcagagaaaaatagatgagacccttgaaagactccaggaacttcaagaggccacggatgagctggacctcaagctgcgccaagctgaggtgatcaagggatcctggcagcccgtgggcgatctcctcattgactctctccaagatcacctcgagaaagtcaaggcacttcgaggagaaattgcgcctctgaaagagaacgtgagccacgtcaatgaccttgctcgccagcttaccactttgggcattcagctctcaccgtataacctcagcactctggaagacctgaacaccagatggaagcttctgcaggtggccgtcgaggaccgagtcaggcagctgcatgaagcccacagggactttggtccagcatctcagcactttctttccacgtctgtccagggtccctgggagagagccatctcgccaaacaaagtgccctactatatcaaccacgagactcaaacaacttgctgggaccatcccaaaatgacagagctctaccagtctttagctgacctgaataatgtcagattctcagcttataggactgccatgaaactccgaagactgcagaaggccctttgcttggatctcttgagcctgtcagctgcatgtgatgccttggaccagcacaacctcaagcaaaatgaccagcccatggatatcctgcagattattaattgtttgaccactatttatgaccgcctggagcaagagcacaacaatttggtcaacgtccctctctgcgtggatatgtgtctgaactggctgctgaatgtttatgatacgggacgaacagggaggatccgtgtcctgtcttttaaaactggcatcatttccctgtgtaaagcacatttggaagacaagtacagataccttttcaagcaagtggcaagttcaacaggattttgtgaccagcgcaggctgggcctccttctgcatgattctatccaaattccaagacagttgggtgaagttgcatcctttgggggcagtaacattgagccaagtgtccggagctgcttccaatttgctaataataagccagagatcgaagcggccctcttcctagactggatgagactggaaccccagtccatggtgtggctgcccgtcctgcacagagtggctgctgcagaaactgccaagcatcaggccaaatgtaacatctgcaaagagtgtccaatcattggattcaggtacaggagtctaaagcactttaattatgacatctgccaaagctgctttttttctggtcgagttgcaaaaggccataaaatgcactatcccatggtggaatattgcactccgactacatcaggagaagatgttcgagactttgccaaggtactaaaaaacaaatttcgaaccaaaaggtattttgcgaagcatccccgaatgggctacctgccagtgcagactgtcttagagggggacaacatggaaactcccgttactctgatcaacttctggccagtagattctgcgcctgcctcgtcccctcagctttcacacgatgatactcattcacgcattgaacattatgctagcaggctagcagaaatggaaaacagcaatggatcttatctaaatgatagcatctctcctaatgagagcatagatgatgaacatttgttaatccagcattactgccaaagtttgaaccaggactcccccctgagccagcctcgtagtcctgcccagatcttgatttccttagagagtgaggaaagaggggagctagagagaatcctagcagatcttgaggaagaaaacaggaatctgcaagcagaatatgaccgtctaaagcagcagcacgaacataaaggcctgtccccactgccgtcccctcctgaaatgatgcccacctctccccagagtccccgggatgctgagctcattgctgaggccaagctactgcgtcaacacaaaggccgcctggaagccaggatgcaaatcctggaagaccacaataaacagctggagtcacagttacacaggctaaggcagctgctggagcaaccccaggcagaggccaaagtgaatggcacaacggtgtcctctccttctacctctctacagaggtccgacagcagtcagcctatgctgctccgagtggttggcagtcaaacttcggactccatgggtgaggaagatcttctcagtcctccccaggacacaagcacagggttagaggaggtgatggagcaactcaacaactccttccctagttcaagaggaagaaatacccctggaaagccaatgagagaggacacaatgtaggaagtcttttccacatggcagatgatttgggcagagcgatggagtccttagtatcagtcatgacagatgaagaaggagcagaataaatgttttacaactcctgattcccgcatggtttttataatattcatacaacaaagaggattagacagtaagagtttacaagaaataaatctatatttttgtgaagggtagtggtattatactgtagatttcagtagtttctaagtctgttattgttttgttaacaatggcaggttttacacgtctatgcaattgtacaaaaaagttataagaaaactacatgtaaaatcttgatagctaaataacttgccatttctttatatggaacgcattttgggttgtttaaaaatttataacagttataaagaaagattgtaaactaaagtgtgctttataaaaaaaagttgtttataaaaacccctaaaaacaaaacaaacacacacacacacacatacacacacacacacaaaactttgaggcagcgcattgttttgcatccttttggcgtgatatccatatgaaattcatggctttttctttttttgcatattaaagataagacttcctctaccaccacaccaaatgactactacacactgctcatttgagaactgtcagctgagtggggcaggcttgagttttcatttcatatatctatatgtctataagtatataaatactatagttatatagataaagagatacgaatttctatagactgactttttccattttttaaatgttcatgtcacatcctaatagaaagaaattacttctagtcagtcatccaggcttacctgcttggtctagaatggatttttcccggagccggaagccaggaggaaactacaccacactaaaacattgtctacagctccagatgtttctcattttaaacaactttccactgacaacgaaagtaaagtaaagtattggatttttttaaagggaacatgtgaatgaatacacaggacttattatatcagagtgagtaatcggttggttggttgattgattgattgattgatacattcagcttcctgctgctagcaatgccacgatttagatttaatgatgcttcagtggaaatcaatcagaaggtattctgaccttgtgaacatcagaaggtattttttaactcccaagcagtagcaggacgatgatagggctggagggctatggattcccagcccatccctgtgaaggagtaggccactctttaagtgaaggattggatgattgttcataatacataaagttctctgtaattacaactaaattattatgccctcttctcacagtcaaaaggaactgggtggtttggtttttgttgcttttttagatttattgtcccatgtgggatgagtttttaaatgccacaagacataatttaaaataaataaactttgggaaaaggtgtaaaacagtagccccatcacatttgtgatactgacaggtatcaacccagaagcccatgaactgtgtttccatcctttgcatttctctgcgagtagttccacacaggtttgtaagtaagtaagaaagaaggcaaattgattcaaatgttacaaaaaaacccttcttggtggattagacaggttaaatatataaacaaacaaacaaaaattgctcaaaaaagaggagaaaagctcaagaggaaaagctaaggactggtaggaaaaagctttactctttcatgccattttatttctttttgatttttaaatcattcattcaatagataccaccgtgtgacctataattttgcaaatctgttacctctgacatcaagtgtaattagcttttggagagtgggctgacatcaagtgtaattagcttttggagagtgggttttgtccattattaataattaattaattaacatcaaacacggcttctcatgctatttctacctcactttggttttggggtgttcctgataattgtgcacacctgagttcacagcttcaccacttgtccattgcgttattttctttttcctttataattctttctttttccttcataattttcaaaagaaaacccaaagctctaaggtaacaaattaccaaattacatgaagatttggtttttgtcttgcatttttttcctttatgtgacgctggaccttttctttacccaaggatttttaaaactcagatttaaaacaaggggttactttacatcctactaagaagtttaagtaagtaagtttcattctaaaatcagaggtaaatagagtgcataaataattttgttttaatctttttgtttttcttttagacacattagctctggagtgagtctgtcataatatttgaacaaaaattgagagctttattgctgcattttaagcataattaatttggacattatttcgtgttgtgttctttataaccaccaagtattaaactgtaaatcataatgtaactgaagcataaacatcacatggcatgttttgtcattgttttcaggtactgagttcttacttgagtatcataatatattgtgttttaacaccaacactgtaacatttacgaattatttttttaaacttcagttttactgcattttcacaacatatcagacttcaccaaatatatgccttactattgtattatagtactgctttactgtgtatctcaataaagcacgcagttatgttac

SEQ ID NO: 15 - protein, 2341 aa, Homo sapiens
MSARKLRNLSYKKAVRRQKLLEQSIQSAQETEKSLHLIQESLTFIDKQLAAYIADKVDAAQMPQEAQKIQSDLTSHEISLEEMKKHNQGKEAAQRVLSQIDVAQKKLQDVSMKFRLFQKPANFEQRLQESKMILDEVKMHLPALETKSVEQEVVQSQLNHCVNLYKSLSEVKSEVEMVIKTGRQIVQKKQTENPKELDERVTALKLHYNELGAKVTERKQQLEKCLKLSRKMRKEMNVLTEWLAATDMELTKRSAVEGMPSNLDSEVAWGKATQKEIEKQKVHLKSITEVGEALKTVLGKKETLVEDKLSLLNSNWIAVTSRAEEWLNLLLEYQKHMETFDQNVDHITKWIIQADTLLDESEKKKPQQKEDVLKRLKAELNDIRPKVDSTRDQAANLMANRGDHCRKLVEPQISELNHRFAAISHRIKTGKASIPLKELEQFNSDIQKLLEPLEAEIQQGVNLKEEDFNKDMNEDNEGTVKELLQRGDNLQQRITDERKREEIKIKQQLLQTKHNALKDLRSQRRKKALEISHQWYQYKRQADDLLKCLDDIEKKLASLPEPRDERKIKEIDRELQKKKEELNAVRRQAEGLSEDGAAMAVEPTQIQLSKRWREIESKFAQFRRLNFAQIHTVREETMMVMTEDMPLEISYVPSTYLTEITHVSQALLEVEQLLNAPDLCAKDFEDLFKQEESLKNIKDSLQQSSGRIDIIHSKKTAALQSATPVERVKLQEALSQLDFQWEKVNKMYKDRQGRFDRSVEKWRRFHYDIKIFNQWLTEAEQFLRKTQIPENWEHAKYKWYLKELQDGIGQRQTVVRTLNATGEEIIQQSSKTDASILQEKLGSLNLRWQEVCKQLSDRKKRLEEQKNILSEFQRDLNEFVLWLEEADNIASIPLEPGKEQQLKEKLEQVKLLVEELPLRQGILKQLNETGGPVLVSAPISPEEQDKLENKLKQTNLQWIKVSRALPEKQGEIEAQIKDLGQLEKKLEDLEEQLNHLLLWLSPIRNQLEIYNQPNQEGPFDVQETEIAVQAKQPDVEEILSKGQHLYKEKPATQPVKRKLEDLSSEWKAVNRLLQELRAKQPDLAPGLTTIGASPTQTVTLVTQPVVTKETAISKLEMPSSLMLEVPALADFNRAWTELTDWLSLLDQVIKSQRVMVGDLEDINEMIIKQKATMQDLEQRRPQLEELITAAQNLKNKTSNQEARTIITDRIERIQNQWDEVQEHLQNRRQQLNEMLKDSTQWLEAKEEAEQVLGQARAKLESWKEGPYTVDAIQKKITETKQLAKDLRQWQTNVDVANDLALKLLRDYSADDTRKVHMITENINASWRSIHKRVSEREAALEETHRLLQQFPLDLEKFLAWLTEAETTANVLQDATRKERLLEDSKGVKELMKQWQDLQGEIEAHTDVYHNLDENSQKILRSLEGSDDAVLLQRRLDNMNFKWSELRKKSLNIRSHLEASSDQWKRLHLSLQELLVWLQLKDDELSRQAPIGGDFPAVQKQNDVHRAFKRELKTKEPVIMSTLETVRIFLTEQPLEGLEKLYQEPRELPPEERAQNVTRLLRKQAEEVNTEWEKLNLHSADWQRKIDETLERLQELQEATDELDLKLRQAEVIKGSWQPVGDLLIDSLQDHLEKVKALRGEIAPLKENVSHVNDLARQLTTLGIQLSPYNLSTLEDLNTRWKLLQVAVEDRVRQLHEAHRDFGPASQHFLSTSVQGPWERAISPNKVPYYINHETQTTCWDHPKMTELYQSLADLNNVRFSAYRTAMKLRRLQKALCLDLLSLSAACDALDQHNLKQNDQPMDILQIINCLTTIYDRLEQEHNNLVNVPLCVDMCLNWLLNVYDTGRTGRIRVLSFKTGIISLCKAHLEDKYRYLFKQVASSTGFCDQRRLGLLLHDSIQIPRQLGEVASFGGSNIEPSVRSCFQFANNKPEIEAALFLDWMRLEPQSMVWLPVLHRVAAAETAKHQAKCNICKECPIIGFRYRSLKHFNYDICQSCFFSGRVAKGHKMHYPMVEYCTPTTSGEDVRDFAKVLKNKFRTKRYFAKHPRMGYLPVQTVLEGDNMETPVTLINFWPVDSAPASSPQLSHDDTHSRIEHYASRLAEMENSNGSYLNDSISPNESIDDEHLLIQHYCQSLNQDSPLSQPRSPAQILISLESEERGELERILADLEEENRNLQAEYDRLKQQHEHKGLSPLPSPPEMMPTSPQSPRDAELIAEAKLLRQHKGRLEARMQILEDHNKQLESQLHRLRQLLEQPQAEAKVNGTTVSSPSTSLQRSDSSQPMLLRVVGSQTSDSMGEEDLLSPPQDTSTGLEEVMEQLNNSFPSSRGRNTPGKPMREDTM

SEQ ID NO: 16 - DNA, 7410 bp, Homo sapiens
acactagcaatggcaaagctttgtgcggaggcattgctggctgctctgaactaaaagcatccgtggggaccgaaagaggtttttgcacaccttattaaggaactccaggatggcattgggcagcggcaaactgttgtcagaacattgaatgcaactggggaagaaataattcagcaatcctcaaaaacagatgccagtattctacaggaaaaattgggaagcctgaatctgcggtggcaggaggtctgcaaacagctgtcagacagaaaaaagaggctagaagaacaaaagaatatcttgtcagaatttcaaagagatttaaatgaatttgttttatggttggaggaagcagataacattgctagtatcccacttgaacctggaaaagagcagcaactaaaagaaaagcttgagcaagtcaagttactggtggaagagttgcccctgcgccagggaattctcaaacaattaaatgaaactggaggacccgtgcttgtaagtgctcccataagcccagaagagcaagataaacttgaaaataagctcaagcagacaaatctccagtggataaaggtttccagagctttacctgagaaacaaggagaaattgaagctcaaataaaagaccttgggcagcttgaaaaaaagcttgaagaccttgaagagcagttaaatcatctgctgctgtggttatctcctattaggaatcagttggaaatttataaccaaccaaaccaagaaggaccatttgacgttcaggaaactgaaatagcagttcaagctaaacaaccggatgtggaagagattttgtctaaagggcagcatttgtacaaggaaaaaccagccactcagccagtgaagaggaagttagaagatctgagctctgagtggaaggcggtaaaccgtttacttcaagagctgagggcaaagcagcctgacctagctcctggactgaccactattggagcctctcctactcagactgttactctggtgacacaacctgtggttactaaggaaactgccatctccaaactagaaatgccatcttccttgatgttggaggtacctgctctggcagatttcaaccgggcttggacagaacttaccgactggctttctctgcttgatcaagttataaaatcacagagggtgatggtgggtgaccttgaggatatcaacgagatgatcatcaagcagaaggcaacaatgcaggatttggaacagaggcgtccccagttggaagaactcattaccgctgcccaaaatttgaaaaacaagaccagcaatcaagaggctagaacaatcattacggatcgaattgaaagaattcagaatcagtgggatgaagtacaagaacaccttcagaaccggaggcaacagttgaatgaaatgttaaaggattcaacacaatggctggaagctaaggaagaagctgagcaggtcttaggacaggccagagccaagcttgagtcatggaaggagggtccctatacagtagatgcaatccaaaagaaaatcacagaaaccaagcagttggccaaagacctccgccagtggcagacaaatgtagatgtggcaaatgacttggccctgaaacttctccgggattattctgcagatgataccagaaaagtccacatgataacagagaatatcaatgcctcttggagaagcattcataaaagggtgagtgagcgagaggctgctttggaagaaactcatagattactgcaacagttccccctggacctggaaaagtttcttgcctggcttacagaagctgaaacaactgccaatgtcctacaggatgctacccgtaaggaaaggctcctagaagactccaagggagtaaaagagctgatgaaacaatggcaagacctccaaggtgaaattgaagctcacacagatgtttatcacaacctggatgaaaacagccaaaaaatcctgagatccctggaaggttccgatgatgcagtcctgttacaaagacgtttggataacatgaacttcaagtggagtgaacttcggaaaaagtctctcaacattaggtcccatttggaagccagttctgaccagtggaagcgtctgcacctttctctgcaggaacttctggtgtggctacagctgaaagatgatgaattaagccggcaggcacctattggaggcgactttccagcagttcagaagcagaacgatgtacatagggccttcaagagggaattgaaaactaaagaacctgtaatcatgagtactcttgagactgtacgaatatttctgacagagcagcctttggaaggactagagaaactctaccaggagcccagagagctgcctcctgaggagagagcccagaatgtcactcggcttctacgaaagcaggctgaggaggtcaatactgagtgggaaaaattgaacctgcactccgctgactggcagagaaaaatagatgagacccttgaaagactccaggaacttcaagaggccacggatgagctggacctcaagctgcgccaagctgaggtgatcaagggatcctggcagcccgtgggcgatctcctcattgactctctccaagatcacctcgagaaagtcaaggcacttcgaggagaaattgcgcctctgaaagagaacgtgagccacgtcaatgaccttgctcgccagcttaccactttgggcattcagctctcaccgtataacctcagcactctggaagacctgaacaccagatggaagcttctgcaggtggccgtcgaggaccgagtcaggcagctgcatgaagcccacagggactttggtccagcatctcagcactttctttccacgtctgtccagggtccctgggagagagccatctcgccaaacaaagtgccctactatatcaaccacgagactcaaacaacttgctgggaccatcccaaaatgacagagctctaccagtctttagctgacctgaataatgtcagattctcagcttataggactgccatgaaactccgaagactgcagaaggccctttgcttggatctcttgagcctgtcagctgcatgtgatgccttggaccagcacaacctcaagcaaaatgaccagcccatggatatcctgcagattattaattgtttgaccactatttatgaccgcctggagcaagagcacaacaatttggtcaacgtccctctctgcgtggatatgtgtctgaactggctgctgaatgtttatgatacgggacgaacagggaggatccgtgtcctgtcttttaaaactggcatcatttccctgtgtaaagcacatttggaagacaagtacagataccttttcaagcaagtggcaagttcaacaggattttgtgaccagcgcaggctgggcctccttctgcatgattctatccaaattccaagacagttgggtgaagttgcatcctttgggggcagtaacattgagccaagtgtccggagctgcttccaatttgctaataataagccagagatcgaagcggccctcttcctagactggatgagactggaaccccagtccatggtgtggctgcccgtcctgcacagagtggctgctgcagaaactgccaagcatcaggccaaatgtaacatctgcaaagagtgtccaatcattggattcaggtacaggagtctaaagcactttaattatgacatctgccaaagctgctttttttctggtcgagttgcaaaaggccataaaatgcactatcccatggtggaatattgcactccgactacatcaggagaagatgttcgagactttgccaaggtactaaaaaacaaatttcgaaccaaaaggtattttgcgaagcatccccgaatgggctacctgccagtgcagactgtcttagagggggacaacatggaaactcccgttactctgatcaacttctggccagtagattctgcgcctgcctcgtcccctcagctttcacacgatgatactcattcacgcattgaacattatgctagcaggctagcagaaatggaaaacagcaatggatcttatctaaatgatagcatctctcctaatgagagcatagatgatgaacatttgttaatccagcattactgccaaagtttgaaccaggactcccccctgagccagcctcgtagtcctgcccagatcttgatttccttagagagtgaggaaagaggggagctagagagaatcctagcagatcttgaggaagaaaacaggaatctgcaagcagaatatgaccgtctaaagcagcagcacgaacataaaggcctgtccccactgccgtcccctcctgaaatgatgcccacctctccccagagtccccgggatgctgagctcattgctgaggccaagctactgcgtcaacacaaaggccgcctggaagccaggatgcaaatcctggaagaccacaataaacagctggagtcacagttacacaggctaaggcagctgctggagcaaccccaggcagaggccaaagtgaatggcacaacggtgtcctctccttctacctctctacagaggtccgacagcagtcagcctatgctgctccgagtggttggcagtcaaacttcggactccatgggtgaggaagatcttctcagtcctccccaggacacaagcacagggttagaggaggtgatggagcaactcaacaactccttccctagttcaagaggaagaaatacccctggaaagccaatgagagaggacacaatgtaggaagtcttttccacatggcagatgatttgggcagagcgatggagtccttagtatcagtcatgacagatgaagaaggagcagaataaatgttttacaactcctgattcccgcatggtttttataatattcatacaacaaagaggattagacagtaagagtttacaagaaataaatctatatttttgtgaagggtagtggtattatactgtagatttcagtagtttctaagtctgttattgttttgttaacaatggcaggttttacacgtctatgcaattgtacaaaaaagttataagaaaactacatgtaaaatcttgatagctaaataacttgccatttctttatatggaacgcattttgggttgtttaaaaatttataacagttataaagaaagattgtaaactaaagtgtgctttataaaaaaaagttgtttataaaaacccctaaaaacaaaacaaacacacacacacacacatacacacacacacacaaaactttgaggcagcgcattgttttgcatccttttggcgtgatatccatatgaaattcatggctttttctttttttgcatattaaagataagacttcctctaccaccacaccaaatgactactacacactgctcatttgagaactgtcagctgagtggggcaggcttgagttttcatttcatatatctatatgtctataagtatataaatactatagttatatagataaagagatacgaatttctatagactgactttttccattttttaaatgttcatgtcacatcctaatagaaagaaattacttctagtcagtcatccaggcttacctgcttggtctagaatggatttttcccggagccggaagccaggaggaaactacaccacactaaaacattgtctacagctccagatgtttctcattttaaacaactttccactgacaacgaaagtaaagtaaagtattggatttttttaaagggaacatgtgaatgaatacacaggacttattatatcagagtgagtaatcggttggttggttgattgattgattgattgatacattcagcttcctgctgctagcaatgccacgatttagatttaatgatgcttcagtggaaatcaatcagaaggtattctgaccttgtgaacatcagaaggtattttttaactcccaagcagtagcaggacgatgatagggctggagggctatggattcccagcccatccctgtgaaggagtaggccactctttaagtgaaggattggatgattgttcataatacataaagttctctgtaattacaactaaattattatgccctcttctcacagtcaaaaggaactgggtggtttggtttttgttgcttttttagatttattgtcccatgtgggatgagtttttaaatgccacaagacataatttaaaataaataaactttgggaaaaggtgtaaaacagtagccccatcacatttgtgatactgacaggtatcaacccagaagcccatgaactgtgtttccatcctttgcatttctctgcgagtagttccacacaggtttgtaagtaagtaagaaagaaggcaaattgattcaaatgttacaaaaaaacccttcttggtggattagacaggttaaatatataaacaaacaaacaaaaattgctcaaaaaagaggagaaaagctcaagaggaaaagctaaggactggtaggaaaaagctttactctttcatgccattttatttctttttgatttttaaatcattcattcaatagataccaccgtgtgacctataattttgcaaatctgttacctctgacatcaagtgtaattagcttttggagagtgggctgacatcaagtgtaattagcttttggagagtgggttttgtccattattaataattaattaattaacatcaaacacggcttctcatgctatttctacctcactttggttttggggtgttcctgataattgtgcacacctgagttcacagcttcaccacttgtccattgcgttattttctttttcctttataattctttctttttccttcataattttcaaaagaaaacccaaagctctaaggtaacaaattaccaaattacatgaagatttggtttttgtcttgcatttttttcctttatgtgacgctggaccttttctttacccaaggatttttaaaactcagatttaaaacaaggggttactttacatcctactaagaagtttaagtaagtaagtttcattctaaaatcagaggtaaatagagtgcataaataattttgttttaatctttttgtttttcttttagacacattagctctggagtgagtctgtcataatatttgaacaaaaattgagagctttattgctgcattttaagcataattaatttggacattatttcgtgttgtgttctttataaccaccaagtattaaactgtaaatcataatgtaactgaagcataaacatcacatggcatgttttgtcattgttttcaggtactgagttcttacttgagtatcataatatattgtgttttaacaccaacactgtaacatttacgaattatttttttaaacttcagttttactgcattttcacaacatatcagacttcaccaaatatatgccttactattgtattatagtactgctttactgtgtatctcaataaagcacgcagttatgttac

SEQ ID NO: 17 - protein, 1225 aa, Homo sapiens
MPSSLMLEVPALADFNRAWTELTDWLSLLDQVIKSQRVMVGDLEDINEMIIKQKATMQDLEQRRPQLEELITAAQNLKNKTSNQEARTIITDRIERIQNQWDEVQEHLQNRRQQLNEMLKDSTQWLEAKEEAEQVLGQARAKLESWKEGPYTVDAIQKKITETKQLAKDLRQWQTNVDVANDLALKLLRDYSADDTRKVHMITENINASWRSIHKRVSEREAALEETHRLLQQFPLDLEKFLAWLTEAETTANVLQDATRKERLLEDSKGVKELMKQWQDLQGEIEAHTDVYHNLDENSQKILRSLEGSDDAVLLQRRLDNMNFKWSELRKKSLNIRSHLEASSDQWKRLHLSLQELLVWLQLKDDELSRQAPIGGDFPAVQKQNDVHRAFKRELKTKEPVIMSTLETVRIFLTEQPLEGLEKLYQEPRELPPEERAQNVTRLLRKQAEEVNTEWEKLNLHSADWQRKIDETLERLQELQEATDELDLKLRQAEVIKGSWQPVGDLLIDSLQDHLEKVKALRGEIAPLKENVSHVNDLARQLTTLGIQLSPYNLSTLEDLNTRWKLLQVAVEDRVRQLHEAHRDFGPASQHFLSTSVQGPWERAISPNKVPYYINHETQTTCWDHPKMTELYQSLADLNNVRFSAYRTAMKLRRLQKALCLDLLSLSAACDALDQHNLKQNDQPMDILQIINCLTTIYDRLEQEHNNLVNVPLCVDMCLNWLLNVYDTGRTGRIRVLSFKTGIISLCKAHLEDKYRYLFKQVASSTGFCDQRRLGLLLHDSIQIPRQLGEVASFGGSNIEPSVRSCFQFANNKPEIEAALFLDWMRLEPQSMVWLPVLHRVAAAETAKHQAKCNICKECPIIGFRYRSLKHFNYDICQSCFFSGRVAKGHKMHYPMVEYCTPTTSGEDVRDFAKVLKNKFRTKRYFAKHPRMGYLPVQTVLEGDNMETPVTLINFWPVDSAPASSPQLSHDDTHSRIEHYASRLAEMENSNGSYLNDSISPNESIDDEHLLIQHYCQSLNQDSPLSQPRSPAQILISLESEERGELERILADLEEENRNLQAEYDRLKQQHEHKGLSPLPSPPEMMPTSPQSPRDAELIAEAKLLRQHKGRLEARMQILEDHNKQLESQLHRLRQLLEQPQAEAKVNGTTVSSPSTSLQRSDSSQPMLLRVVGSQTSDSMGEEDLLSPPQDTSTGLEEVMEQLNNSFPSSRGRNTPGKPMREDTM

SEQ ID NO: 18 - DNA, 5623 bp, Homo sapiens
gggttttctcaggattgctatgcaacaggatcagtgctgtagtgcccggttcaagctgaaaatgttacacaggaagacataccatgtaaaggacctccaaggtgaaattgaagctcacacagatgtttatcacaacctggatgaaaacagccaaaaaatcctgagatccctggaaggttccgatgatgcagtcctgttacaaagacgtttggataacatgaacttcaagtggagtgaacttcggaaaaagtctctcaacattaggtcccatttggaagccagttctgaccagtggaagcgtctgcacctttctctgcaggaacttctggtgtggctacagctgaaagatgatgaattaagccggcaggcacctattggaggcgactttccagcagttcagaagcagaacgatgtacatagggccttcaagagggaattgaaaactaaagaacctgtaatcatgagtactcttgagactgtacgaatatttctgacagagcagcctttggaaggactagagaaactctaccaggagcccagagagctgcctcctgaggagagagcccagaatgtcactcggcttctacgaaagcaggctgaggaggtcaatactgagtgggaaaaattgaacctgcactccgctgactggcagagaaaaatagatgagacccttgaaagactccaggaacttcaagaggccacggatgagctggacctcaagctgcgccaagctgaggtgatcaagggatcctggcagcccgtgggcgatctcctcattgactctctccaagatcacctcgagaaagtcaaggcacttcgaggagaaattgcgcctctgaaagagaacgtgagccacgtcaatgaccttgctcgccagcttaccactttgggcattcagctctcaccgtataacctcagcactctggaagacctgaacaccagatggaagcttctgcaggtggccgtcgaggaccgagtcaggcagctgcatgaagcccacagggactttggtccagcatctcagcactttctttccacgtctgtccagggtccctgggagagagccatctcgccaaacaaagtgccctactatatcaaccacgagactcaaacaacttgctgggaccatcccaaaatgacagagctctaccagtctttagctgacctgaataatgtcagattctcagcttataggactgccatgaaactccgaagactgcagaaggccctttgcttggatctcttgagcctgtcagctgcatgtgatgccttggaccagcacaacctcaagcaaaatgaccagcccatggatatcctgcagattattaattgtttgaccactatttatgaccgcctggagcaagagcacaacaatttggtcaacgtccctctctgcgtggatatgtgtctgaactggctgctgaatgtttatgatacgggacgaacagggaggatccgtgtcctgtcttttaaaactggcatcatttccctgtgtaaagcacatttggaagacaagtacagataccttttcaagcaagtggcaagttcaacaggattttgtgaccagcgcaggctgggcctccttctgcatgattctatccaaattccaagacagttgggtgaagttgcatcctttgggggcagtaacattgagccaagtgtccggagctgcttccaatttgctaataataagccagagatcgaagcggccctcttcctagactggatgagactggaaccccagtccatggtgtggctgcccgtcctgcacagagtggctgctgcagaaactgccaagcatcaggccaaatgtaacatctgcaaagagtgtccaatcattggattcaggtacaggagtctaaagcactttaattatgacatctgccaaagctgctttttttctggtcgagttgcaaaaggccataaaatgcactatcccatggtggaatattgcactccgactacatcaggagaagatgttcgagactttgccaaggtactaaaaaacaaatttcgaaccaaaaggtattttgcgaagcatccccgaatgggctacctgccagtgcagactgtcttagagggggacaacatggaaactcccgttactctgatcaacttctggccagtagattctgcgcctgcctcgtcccctcagctttcacacgatgatactcattcacgcattgaacattatgctagcaggctagcagaaatggaaaacagcaatggatcttatctaaatgatagcatctctcctaatgagagcatagatgatgaacatttgttaatccagcattactgccaaagtttgaaccaggactcccccctgagccagcctcgtagtcctgcccagatcttgatttccttagagagtgaggaaagaggggagctagagagaatcctagcagatcttgaggaagaaaacaggaatctgcaagcagaatatgaccgtctaaagcagcagcacgaacataaaggcctgtccccactgccgtcccctcctgaaatgatgcccacctctccccagagtccccgggatgctgagctcattgctgaggccaagctactgcgtcaacacaaaggccgcctggaagccaggatgcaaatcctggaagaccacaataaacagctggagtcacagttacacaggctaaggcagctgctggagcaaccccaggcagaggccaaagtgaatggcacaacggtgtcctctccttctacctctctacagaggtccgacagcagtcagcctatgctgctccgagtggttggcagtcaaacttcggactccatgggtgaggaagatcttctcagtcctccccaggacacaagcacagggttagaggaggtgatggagcaactcaacaactccttccctagttcaagaggaagaaatacccctggaaagccaatgagagaggacacaatgtaggaagtcttttccacatggcagatgatttgggcagagcgatggagtccttagtatcagtcatgacagatgaagaaggagcagaataaatgttttacaactcctgattcccgcatggtttttataatattcatacaacaaagaggattagacagtaagagtttacaagaaataaatctatatttttgtgaagggtagtggtattatactgtagatttcagtagtttctaagtctgttattgttttgttaacaatggcaggttttacacgtctatgcaattgtacaaaaaagttataagaaaactacatgtaaaatcttgatagctaaataacttgccatttctttatatggaacgcattttgggttgtttaaaaatttataacagttataaagaaagattgtaaactaaagtgtgctttataaaaaaaagttgtttataaaaacccctaaaaacaaaacaaacacacacacacacacatacacacacacacacaaaactttgaggcagcgcattgttttgcatccttttggcgtgatatccatatgaaattcatggctttttctttttttgcatattaaagataagacttcctctaccaccacaccaaatgactactacacactgctcatttgagaactgtcagctgagtggggcaggcttgagttttcatttcatatatctatatgtctataagtatataaatactatagttatatagataaagagatacgaatttctatagactgactttttccattttttaaatgttcatgtcacatcctaatagaaagaaattacttctagtcagtcatccaggcttacctgcttggtctagaatggatttttcccggagccggaagccaggaggaaactacaccacactaaaacattgtctacagctccagatgtttctcattttaaacaactttccactgacaacgaaagtaaagtaaagtattggatttttttaaagggaacatgtgaatgaatacacaggacttattatatcagagtgagtaatcggttggttggttgattgattgattgattgatacattcagcttcctgctgctagcaatgccacgatttagatttaatgatgcttcagtggaaatcaatcagaaggtattctgaccttgtgaacatcagaaggtattttttaactcccaagcagtagcaggacgatgatagggctggagggctatggattcccagcccatccctgtgaaggagtaggccactctttaagtgaaggattggatgattgttcataatacataaagttctctgtaattacaactaaattattatgccctcttctcacagtcaaaaggaactgggtggtttggtttttgttgcttttttagatttattgtcccatgtgggatgagtttttaaatgccacaagacataatttaaaataaataaactttgggaaaaggtgtaaaacagtagccccatcacatttgtgatactgacaggtatcaacccagaagcccatgaactgtgtttccatcctttgcatttctctgcgagtagttccacacaggtttgtaagtaagtaagaaagaaggcaaattgattcaaatgttacaaaaaaacccttcttggtggattagacaggttaaatatataaacaaacaaacaaaaattgctcaaaaaagaggagaaaagctcaagaggaaaagctaaggactggtaggaaaaagctttactctttcatgccattttatttctttttgatttttaaatcattcattcaatagataccaccgtgtgacctataattttgcaaatctgttacctctgacatcaagtgtaattagcttttggagagtgggctgacatcaagtgtaattagcttttggagagtgggttttgtccattattaataattaattaattaacatcaaacacggcttctcatgctatttctacctcactttggttttggggtgttcctgataattgtgcacacctgagttcacagcttcaccacttgtccattgcgttattttctttttcctttataattctttctttttccttcataattttcaaaagaaaacccaaagctctaaggtaacaaattaccaaattacatgaagatttggtttttgtcttgcatttttttcctttatgtgacgctggaccttttctttacccaaggatttttaaaactcagatttaaaacaaggggttactttacatcctactaagaagtttaagtaagtaagtttcattctaaaatcagaggtaaatagagtgcataaataattttgttttaatctttttgtttttcttttagacacattagctctggagtgagtctgtcataatatttgaacaaaaattgagagctttattgctgcattttaagcataattaatttggacattatttcgtgttgtgttctttataaccaccaagtattaaactgtaaatcataatgtaactgaagcataaacatcacatggcatgttttgtcattgttttcaggtactgagttcttacttgagtatcataatatattgtgttttaacaccaacactgtaacatttacgaattatttttttaaacttcagttttactgcattttcacaacatatcagacttcaccaaatatatgccttactattgtattatagtactgctttactgtgtatctcaataaagcacgcagttatgttac

SEQ ID NO: 19 - protein, 956 aa, Homo sapiens
MLHRKTYHVKDLQGEIEAHTDVYHNLDENSQKILRSLEGSDDAVLLQRRLDNMNFKWSELRKKSLNIRSHLEASSDQWKRLHLSLQELLVWLQLKDDELSRQAPIGGDFPAVQKQNDVHRAFKRELKTKEPVIMSTLETVRIFLTEQPLEGLEKLYQEPRELPPEERAQNVTRLLRKQAEEVNTEWEKLNLHSADWQRKIDETLERLQELQEATDELDLKLRQAEVIKGSWQPVGDLLIDSLQDHLEKVKALRGEIAPLKENVSHVNDLARQLTTLGIQLSPYNLSTLEDLNTRWKLLQVAVEDRVRQLHEAHRDFGPASQHFLSTSVQGPWERAISPNKVPYYINHETQTTCWDHPKMTELYQSLADLNNVRFSAYRTAMKLRRLQKALCLDLLSLSAACDALDQHNLKQNDQPMDILQIINCLTTIYDRLEQEHNNLVNVPLCVDMCLNWLLNVYDTGRTGRIRVLSFKTGIISLCKAHLEDKYRYLFKQVASSTGFCDQRRLGLLLHDSIQIPRQLGEVASFGGSNIEPSVRSCFQFANNKPEIEAALFLDWMRLEPQSMVWLPVLHRVAAAETAKHQAKCNICKECPIIGFRYRSLKHFNYDICQSCFFSGRVAKGHKMHYPMVEYCTPTTSGEDVRDFAKVLKNKFRTKRYFAKHPRMGYLPVQTVLEGDNMETPVTLINFWPVDSAPASSPQLSHDDTHSRIEHYASRLAEMENSNGSYLNDSISPNESIDDEHLLIQHYCQSLNQDSPLSQPRSPAQILISLESEERGELERILADLEEENRNLQAEYDRLKQQHEHKGLSPLPSPPEMMPTSPQSPRDAELIAEAKLLRQHKGRLEARMQILEDHNKQLESQLHRLRQLLEQPQAEAKVNGTTVSSPSTSLQRSDSSQPMLLRVVGSQTSDSMGEEDLLSPPQDTSTGLEEVMEQLNNSFPSSRGRNTPGKPMREDTM

SEQ ID NO: 20 - DNA, 4623 bp, Homo sapiens
actttcggggagcccggcggctctgggaagctcactcctccactcgtacccacactcgaccgcggagcccttgcagccatgagggaacagctcaaaggccacgagactcaaacaacttgctgggaccatcccaaaatgacagagctctaccagtctttagctgacctgaataatgtcagattctcagcttataggactgccatgaaactccgaagactgcagaaggccctttgcttggatctcttgagcctgtcagctgcatgtgatgccttggaccagcacaacctcaagcaaaatgaccagcccatggatatcctgcagattattaattgtttgaccactatttatgaccgcctggagcaagagcacaacaatttggtcaacgtccctctctgcgtggatatgtgtctgaactggctgctgaatgtttatgatacgggacgaacagggaggatccgtgtcctgtcttttaaaactggcatcatttccctgtgtaaagcacatttggaagacaagtacagataccttttcaagcaagtggcaagttcaacaggattttgtgaccagcgcaggctgggcctccttctgcatgattctatccaaattccaagacagttgggtgaagttgcatcctttgggggcagtaacattgagccaagtgtccggagctgcttccaatttgctaataataagccagagatcgaagcggccctcttcctagactggatgagactggaaccccagtccatggtgtggctgcccgtcctgcacagagtggctgctgcagaaactgccaagcatcaggccaaatgtaacatctgcaaagagtgtccaatcattggattcaggtacaggagtctaaagcactttaattatgacatctgccaaagctgctttttttctggtcgagttgcaaaaggccataaaatgcactatcccatggtggaatattgcactccgactacatcaggagaagatgttcgagactttgccaaggtactaaaaaacaaatttcgaaccaaaaggtattttgcgaagcatccccgaatgggctacctgccagtgcagactgtcttagagggggacaacatggaaactcccgttactctgatcaacttctggccagtagattctgcgcctgcctcgtcccctcagctttcacacgatgatactcattcacgcattgaacattatgctagcaggctagcagaaatggaaaacagcaatggatcttatctaaatgatagcatctctcctaatgagagcatagatgatgaacatttgttaatccagcattactgccaaagtttgaaccaggactcccccctgagccagcctcgtagtcctgcccagatcttgatttccttagagagtgaggaaagaggggagctagagagaatcctagcagatcttgaggaagaaaacaggaatctgcaagcagaatatgaccgtctaaagcagcagcacgaacataaaggcctgtccccactgccgtcccctcctgaaatgatgcccacctctccccagagtccccgggatgctgagctcattgctgaggccaagctactgcgtcaacacaaaggccgcctggaagccaggatgcaaatcctggaagaccacaataaacagctggagtcacagttacacaggctaaggcagctgctggagcaaccccaggcagaggccaaagtgaatggcacaacggtgtcctctccttctacctctctacagaggtccgacagcagtcagcctatgctgctccgagtggttggcagtcaaacttcggactccatgggtgaggaagatcttctcagtcctccccaggacacaagcacagggttagaggaggtgatggagcaactcaacaactccttccctagttcaagaggaagaaatacccctggaaagccaatgagagaggacacaatgtaggaagtcttttccacatggcagatgatttgggcagagcgatggagtccttagtatcagtcatgacagatgaagaaggagcagaataaatgttttacaactcctgattcccgcatggtttttataatattcatacaacaaagaggattagacagtaagagtttacaagaaataaatctatatttttgtgaagggtagtggtattatactgtagatttcagtagtttctaagtctgttattgttttgttaacaatggcaggttttacacgtctatgcaattgtacaaaaaagttataagaaaactacatgtaaaatcttgatagctaaataacttgccatttctttatatggaacgcattttgggttgtttaaaaatttataacagttataaagaaagattgtaaactaaagtgtgctttataaaaaaaagttgtttataaaaacccctaaaaacaaaacaaacacacacacacacacatacacacacacacacaaaactttgaggcagcgcattgttttgcatccttttggcgtgatatccatatgaaattcatggctttttctttttttgcatattaaagataagacttcctctaccaccacaccaaatgactactacacactgctcatttgagaactgtcagctgagtggggcaggcttgagttttcatttcatatatctatatgtctataagtatataaatactatagttatatagataaagagatacgaatttctatagactgactttttccattttttaaatgttcatgtcacatcctaatagaaagaaattacttctagtcagtcatccaggcttacctgcttggtctagaatggatttttcccggagccggaagccaggaggaaactacaccacactaaaacattgtctacagctccagatgtttctcattttaaacaactttccactgacaacgaaagtaaagtaaagtattggatttttttaaagggaacatgtgaatgaatacacaggacttattatatcagagtgagtaatcggttggttggttgattgattgattgattgatacattcagcttcctgctgctagcaatgccacgatttagatttaatgatgcttcagtggaaatcaatcagaaggtattctgaccttgtgaacatcagaaggtattttttaactcccaagcagtagcaggacgatgatagggctggagggctatggattcccagcccatccctgtgaaggagtaggccactctttaagtgaaggattggatgattgttcataatacataaagttctctgtaattacaactaaattattatgccctcttctcacagtcaaaaggaactgggtggtttggtttttgttgcttttttagatttattgtcccatgtgggatgagtttttaaatgccacaagacataatttaaaataaataaactttgggaaaaggtgtaaaacagtagccccatcacatttgtgatactgacaggtatcaacccagaagcccatgaactgtgtttccatcctttgcatttctctgcgagtagttccacacaggtttgtaagtaagtaagaaagaaggcaaattgattcaaatgttacaaaaaaacccttcttggtggattagacaggttaaatatataaacaaacaaacaaaaattgctcaaaaaagaggagaaaagctcaagaggaaaagctaaggactggtaggaaaaagctttactctttcatgccattttatttctttttgatttttaaatcattcattcaatagataccaccgtgtgacctataattttgcaaatctgttacctctgacatcaagtgtaattagcttttggagagtgggctgacatcaagtgtaattagcttttggagagtgggttttgtccattattaataattaattaattaacatcaaacacggcttctcatgctatttctacctcactttggttttggggtgttcctgataattgtgcacacctgagttcacagcttcaccacttgtccattgcgttattttctttttcctttataattctttctttttccttcataattttcaaaagaaaacccaaagctctaaggtaacaaattaccaaattacatgaagatttggtttttgtcttgcatttttttcctttatgtgacgctggaccttttctttacccaaggatttttaaaactcagatttaaaacaaggggttactttacatcctactaagaagtttaagtaagtaagtttcattctaaaatcagaggtaaatagagtgcataaataattttgttttaatctttttgtttttcttttagacacattagctctggagtgagtctgtcataatatttgaacaaaaattgagagctttattgctgcattttaagcataattaatttggacattatttcgtgttgtgttctttataaccaccaagtattaaactgtaaatcataatgtaactgaagcataaacatcacatggcatgttttgtcattgttttcaggtactgagttcttacttgagtatcataatatattgtgttttaacaccaacactgtaacatttacgaattatttttttaaacttcagttttactgcattttcacaacatatcagacttcaccaaatatatgccttactattgtattatagtactgctttactgtgtatctcaataaagcacgcagttatgttac

SEQ ID NO: 21 - protein, 617 aa, Homo sapiens
MREQLKGHETQTTCWDHPKMTELYQSLADLNNVRFSAYRTAMKLRRLQKALCLDLLSLSAACDALDQHNLKQNDQPMDILQIINCLTTIYDRLEQEHNNLVNVPLCVDMCLNWLLNVYDTGRTGRIRVLSFKTGIISLCKAHLEDKYRYLFKQVASSTGFCDQRRLGLLLHDSIQIPRQLGEVASFGGSNIEPSVRSCFQFANNKPEIEAALFLDWMRLEPQSMVWLPVLHRVAAAETAKHQAKCNICKECPIIGFRYRSLKHFNYDICQSCFFSGRVAKGHKMHYPMVEYCTPTTSGEDVRDFAKVLKNKFRTKRYFAKHPRMGYLPVQTVLEGDNMETPVTLINFWPVDSAPASSPQLSHDDTHSRIEHYASRLAEMENSNGSYLNDSISPNESIDDEHLLIQHYCQSLNQDSPLSQPRSPAQILISLESEERGELERILADLEEENRNLQAEYDRLKQQHEHKGLSPLPSPPEMMPTSPQSPRDAELIAEAKLLRQHKGRLEARMQILEDHNKQLESQLHRLRQLLEQPQAEAKVNGTTVSSPSTSLQRSDSSQPMLLRVVGSQTSDSMGEEDLLSPPQDTSTGLEEVMEQLNNSFPSSRGRNTPGKPMREDTM

SEQ ID NO: 22 - DNA, 4591 bp, Homo sapiens
actttcggggagcccggcggctctgggaagctcactcctccactcgtacccacactcgaccgcggagcccttgcagccatgagggaacagctcaaaggccacgagactcaaacaacttgctgggaccatcccaaaatgacagagctctaccagtctttagctgacctgaataatgtcagattctcagcttataggactgccatgaaactccgaagactgcagaaggccctttgcttggatctcttgagcctgtcagctgcatgtgatgccttggaccagcacaacctcaagcaaaatgaccagcccatggatatcctgcagattattaattgtttgaccactatttatgaccgcctggagcaagagcacaacaatttggtcaacgtccctctctgcgtggatatgtgtctgaactggctgctgaatgtttatgatacgggacgaacagggaggatccgtgtcctgtcttttaaaactggcatcatttccctgtgtaaagcacatttggaagacaagtacagataccttttcaagcaagtggcaagttcaacaggattttgtgaccagcgcaggctgggcctccttctgcatgattctatccaaattccaagacagttgggtgaagttgcatcctttgggggcagtaacattgagccaagtgtccggagctgcttccaatttgctaataataagccagagatcgaagcggccctcttcctagactggatgagactggaaccccagtccatggtgtggctgcccgtcctgcacagagtggctgctgcagaaactgccaagcatcaggccaaatgtaacatctgcaaagagtgtccaatcattggattcaggtacaggagtctaaagcactttaattatgacatctgccaaagctgctttttttctggtcgagttgcaaaaggccataaaatgcactatcccatggtggaatattgcactccgactacatcaggagaagatgttcgagactttgccaaggtactaaaaaacaaatttcgaaccaaaaggtattttgcgaagcatccccgaatgggctacctgccagtgcagactgtcttagagggggacaacatggaaactcccgttactctgatcaacttctggccagtagattctgcgcctgcctcgtcccctcagctttcacacgatgatactcattcacgcattgaacattatgctagcaggctagcagaaatggaaaacagcaatggatcttatctaaatgatagcatctctcctaatgagagcatagatgatgaacatttgttaatccagcattactgccaaagtttgaaccaggactcccccctgagccagcctcgtagtcctgcccagatcttgatttccttagagagtgaggaaagaggggagctagagagaatcctagcagatcttgaggaagaaaacaggaatctgcaagcagaatatgaccgtctaaagcagcagcacgaacataaaggcctgtccccactgccgtcccctcctgaaatgatgcccacctctccccagagtccccgggatgctgagctcattgctgaggccaagctactgcgtcaacacaaaggccgcctggaagccaggatgcaaatcctggaagaccacaataaacagctggagtcacagttacacaggctaaggcagctgctggagcaaccccaggcagaggccaaagtgaatggcacaacggtgtcctctccttctacctctctacagaggtccgacagcagtcagcctatgctgctccgagtggttggcagtcaaacttcggactccatgggtgaggaagatcttctcagtcctccccaggacacaagcacagggttagaggaggtgatggagcaactcaacaactccttccctagttcaagaggacacaatgtaggaagtcttttccacatggcagatgatttgggcagagcgatggagtccttagtatcagtcatgacagatgaagaaggagcagaataaatgttttacaactcctgattcccgcatggtttttataatattcatacaacaaagaggattagacagtaagagtttacaagaaataaatctatatttttgtgaagggtagtggtattatactgtagatttcagtagtttctaagtctgttattgttttgttaacaatggcaggttttacacgtctatgcaattgtacaaaaaagttataagaaaactacatgtaaaatcttgatagctaaataacttgccatttctttatatggaacgcattttgggttgtttaaaaatttataacagttataaagaaagattgtaaactaaagtgtgctttataaaaaaaagttgtttataaaaacccctaaaaacaaaacaaacacacacacacacacatacacacacacacacaaaactttgaggcagcgcattgttttgcatccttttggcgtgatatccatatgaaattcatggctttttctttttttgcatattaaagataagacttcctctaccaccacaccaaatgactactacacactgctcatttgagaactgtcagctgagtggggcaggcttgagttttcatttcatatatctatatgtctataagtatataaatactatagttatatagataaagagatacgaatttctatagactgactttttccattttttaaatgttcatgtcacatcctaatagaaagaaattacttctagtcagtcatccaggcttacctgcttggtctagaatggatttttcccggagccggaagccaggaggaaactacaccacactaaaacattgtctacagctccagatgtttctcattttaaacaactttccactgacaacgaaagtaaagtaaagtattggatttttttaaagggaacatgtgaatgaatacacaggacttattatatcagagtgagtaatcggttggttggttgattgattgattgattgatacattcagcttcctgctgctagcaatgccacgatttagatttaatgatgcttcagtggaaatcaatcagaaggtattctgaccttgtgaacatcagaaggtattttttaactcccaagcagtagcaggacgatgatagggctggagggctatggattcccagcccatccctgtgaaggagtaggccactctttaagtgaaggattggatgattgttcataatacataaagttctctgtaattacaactaaattattatgccctcttctcacagtcaaaaggaactgggtggtttggtttttgttgcttttttagatttattgtcccatgtgggatgagtttttaaatgccacaagacataatttaaaataaataaactttgggaaaaggtgtaaaacagtagccccatcacatttgtgatactgacaggtatcaacccagaagcccatgaactgtgtttccatcctttgcatttctctgcgagtagttccacacaggtttgtaagtaagtaagaaagaaggcaaattgattcaaatgttacaaaaaaacccttcttggtggattagacaggttaaatatataaacaaacaaacaaaaattgctcaaaaaagaggagaaaagctcaagaggaaaagctaaggactggtaggaaaaagctttactctttcatgccattttatttctttttgatttttaaatcattcattcaatagataccaccgtgtgacctataattttgcaaatctgttacctctgacatcaagtgtaattagcttttggagagtgggctgacatcaagtgtaattagcttttggagagtgggttttgtccattattaataattaattaattaacatcaaacacggcttctcatgctatttctacctcactttggttttggggtgttcctgataattgtgcacacctgagttcacagcttcaccacttgtccattgcgttattttctttttcctttataattctttctttttccttcataattttcaaaagaaaacccaaagctctaaggtaacaaattaccaaattacatgaagatttggtttttgtcttgcatttttttcctttatgtgacgctggaccttttctttacccaaggatttttaaaactcagatttaaaacaaggggttactttacatcctactaagaagtttaagtaagtaagtttcattctaaaatcagaggtaaatagagtgcataaataattttgttttaatctttttgtttttcttttagacacattagctctggagtgagtctgtcataatatttgaacaaaaattgagagctttattgctgcattttaagcataattaatttggacattatttcgtgttgtgttctttataaccaccaagtattaaactgtaaatcataatgtaactgaagcataaacatcacatggcatgttttgtcattgttttcaggtactgagttcttacttgagtatcataatatattgtgttttaacaccaacactgtaacatttacgaattatttttttaaacttcagttttactgcattttcacaacatatcagacttcaccaaatatatgccttactattgtattatagtactgctttactgtgtatctcaataaagcacgcagttatgttac

SEQ ID NO: 23 - protein, 635 aa, Homo sapiens
MREQLKGHETQTTCWDHPKMTELYQSLADLNNVRFSAYRTAMKLRRLQKALCLDLLSLSAACDALDQHNLKQNDQPMDILQIINCLTTIYDRLEQEHNNLVNVPLCVDMCLNWLLNVYDTGRTGRIRVLSFKTGIISLCKAHLEDKYRYLFKQVASSTGFCDQRRLGLLLHDSIQIPRQLGEVASFGGSNIEPSVRSCFQFANNKPEIEAALFLDWMRLEPQSMVWLPVLHRVAAAETAKHQAKCNICKECPIIGFRYRSLKHFNYDICQSCFFSGRVAKGHKMHYPMVEYCTPTTSGEDVRDFAKVLKNKFRTKRYFAKHPRMGYLPVQTVLEGDNMETPVTLINFWPVDSAPASSPQLSHDDTHSRIEHYASRLAEMENSNGSYLNDSISPNESIDDEHLLIQHYCQSLNQDSPLSQPRSPAQILISLESEERGELERILADLEEENRNLQAEYDRLKQQHEHKGLSPLPSPPEMMPTSPQSPRDAELIAEAKLLRQHKGRLEARMQILEDHNKQLESQLHRLRQLLEQPQAEAKVNGTTVSSPSTSLQRSDSSQPMLLRVVGSQTSDSMGEEDLLSPPQDTSTGLEEVMEQLNNSFPSSRGHNVGSLFHMADDLGRAMESLVSVMTDEEGAE

SEQ ID NO: 24 - DNA, 4584 bp, Homo sapiens
actttcggggagcccggcggctctgggaagctcactcctccactcgtacccacactcgaccgcggagcccttgcagccatgagggaacagctcaaaggccacgagactcaaacaacttgctgggaccatcccaaaatgacagagctctaccagtctttagctgacctgaataatgtcagattctcagcttataggactgccatgaaactccgaagactgcagaaggccctttgcttggatctcttgagcctgtcagctgcatgtgatgccttggaccagcacaacctcaagcaaaatgaccagcccatggatatcctgcagattattaattgtttgaccactatttatgaccgcctggagcaagagcacaacaatttggtcaacgtccctctctgcgtggatatgtgtctgaactggctgctgaatgtttatgatacgggacgaacagggaggatccgtgtcctgtcttttaaaactggcatcatttccctgtgtaaagcacatttggaagacaagtacagataccttttcaagcaagtggcaagttcaacaggattttgtgaccagcgcaggctgggcctccttctgcatgattctatccaaattccaagacagttgggtgaagttgcatcctttgggggcagtaacattgagccaagtgtccggagctgcttccaatttgctaataataagccagagatcgaagcggccctcttcctagactggatgagactggaaccccagtccatggtgtggctgcccgtcctgcacagagtggctgctgcagaaactgccaagcatcaggccaaatgtaacatctgcaaagagtgtccaatcattggattcaggtacaggagtctaaagcactttaattatgacatctgccaaagctgctttttttctggtcgagttgcaaaaggccataaaatgcactatcccatggtggaatattgcactccgactacatcaggagaagatgttcgagactttgccaaggtactaaaaaacaaatttcgaaccaaaaggtattttgcgaagcatccccgaatgggctacctgccagtgcagactgtcttagagggggacaacatggaaacgcctgcctcgtcccctcagctttcacacgatgatactcattcacgcattgaacattatgctagcaggctagcagaaatggaaaacagcaatggatcttatctaaatgatagcatctctcctaatgagagcatagatgatgaacatttgttaatccagcattactgccaaagtttgaaccaggactcccccctgagccagcctcgtagtcctgcccagatcttgatttccttagagagtgaggaaagaggggagctagagagaatcctagcagatcttgaggaagaaaacaggaatctgcaagcagaatatgaccgtctaaagcagcagcacgaacataaaggcctgtccccactgccgtcccctcctgaaatgatgcccacctctccccagagtccccgggatgctgagctcattgctgaggccaagctactgcgtcaacacaaaggccgcctggaagccaggatgcaaatcctggaagaccacaataaacagctggagtcacagttacacaggctaaggcagctgctggagcaaccccaggcagaggccaaagtgaatggcacaacggtgtcctctccttctacctctctacagaggtccgacagcagtcagcctatgctgctccgagtggttggcagtcaaacttcggactccatgggtgaggaagatcttctcagtcctccccaggacacaagcacagggttagaggaggtgatggagcaactcaacaactccttccctagttcaagaggaagaaatacccctggaaagccaatgagagaggacacaatgtaggaagtcttttccacatggcagatgatttgggcagagcgatggagtccttagtatcagtcatgacagatgaagaaggagcagaataaatgttttacaactcctgattcccgcatggtttttataatattcatacaacaaagaggattagacagtaagagtttacaagaaataaatctatatttttgtgaagggtagtggtattatactgtagatttcagtagtttctaagtctgttattgttttgttaacaatggcaggttttacacgtctatgcaattgtacaaaaaagttataagaaaactacatgtaaaatcttgatagctaaataacttgccatttctttatatggaacgcattttgggttgtttaaaaatttataacagttataaagaaagattgtaaactaaagtgtgctttataaaaaaaagttgtttataaaaacccctaaaaacaaaacaaacacacacacacacacatacacacacacacacaaaactttgaggcagcgcattgttttgcatccttttggcgtgatatccatatgaaattcatggctttttctttttttgcatattaaagataagacttcctctaccaccacaccaaatgactactacacactgctcatttgagaactgtcagctgagtggggcaggcttgagttttcatttcatatatctatatgtctataagtatataaatactatagttatatagataaagagatacgaatttctatagactgactttttccattttttaaatgttcatgtcacatcctaatagaaagaaattacttctagtcagtcatccaggcttacctgcttggtctagaatggatttttcccggagccggaagccaggaggaaactacaccacactaaaacattgtctacagctccagatgtttctcattttaaacaactttccactgacaacgaaagtaaagtaaagtattggatttttttaaagggaacatgtgaatgaatacacaggacttattatatcagagtgagtaatcggttggttggttgattgattgattgattgatacattcagcttcctgctgctagcaatgccacgatttagatttaatgatgcttcagtggaaatcaatcagaaggtattctgaccttgtgaacatcagaaggtattttttaactcccaagcagtagcaggacgatgatagggctggagggctatggattcccagcccatccctgtgaaggagtaggccactctttaagtgaaggattggatgattgttcataatacataaagttctctgtaattacaactaaattattatgccctcttctcacagtcaaaaggaactgggtggtttggtttttgttgcttttttagatttattgtcccatgtgggatgagtttttaaatgccacaagacataatttaaaataaataaactttgggaaaaggtgtaaaacagtagccccatcacatttgtgatactgacaggtatcaacccagaagcccatgaactgtgtttccatcctttgcatttctctgcgagtagttccacacaggtttgtaagtaagtaagaaagaaggcaaattgattcaaatgttacaaaaaaacccttcttggtggattagacaggttaaatatataaacaaacaaacaaaaattgctcaaaaaagaggagaaaagctcaagaggaaaagctaaggactggtaggaaaaagctttactctttcatgccattttatttctttttgatttttaaatcattcattcaatagataccaccgtgtgacctataattttgcaaatctgttacctctgacatcaagtgtaattagcttttggagagtgggctgacatcaagtgtaattagcttttggagagtgggttttgtccattattaataattaattaattaacatcaaacacggcttctcatgctatttctacctcactttggttttggggtgttcctgataattgtgcacacctgagttcacagcttcaccacttgtccattgcgttattttctttttcctttataattctttctttttccttcataattttcaaaagaaaacccaaagctctaaggtaacaaattaccaaattacatgaagatttggtttttgtcttgcatttttttcctttatgtgacgctggaccttttctttacccaaggatttttaaaactcagatttaaaacaaggggttactttacatcctactaagaagtttaagtaagtaagtttcattctaaaatcagaggtaaatagagtgcataaataattttgttttaatctttttgtttttcttttagacacattagctctggagtgagtctgtcataatatttgaacaaaaattgagagctttattgctgcattttaagcataattaatttggacattatttcgtgttgtgttctttataaccaccaagtattaaactgtaaatcataatgtaactgaagcataaacatcacatggcatgttttgtcattgttttcaggtactgagttcttacttgagtatcataatatattgtgttttaacaccaacactgtaacatttacgaattatttttttaaacttcagttttactgcattttcacaacatatcagacttcaccaaatatatgccttactattgtattatagtactgctttactgtgtatctcaataaagcacgcagttatgttac

SEQ ID NO: 25 - protein, 604 aa, Homo sapiens
MREQLKGHETQTTCWDHPKMTELYQSLADLNNVRFSAYRTAMKLRRLQKALCLDLLSLSAACDALDQHNLKQNDQPMDILQIINCLTTIYDRLEQEHNNLVNVPLCVDMCLNWLLNVYDTGRTGRIRVLSFKTGIISLCKAHLEDKYRYLFKQVASSTGFCDQRRLGLLLHDSIQIPRQLGEVASFGGSNIEPSVRSCFQFANNKPEIEAALFLDWMRLEPQSMVWLPVLHRVAAAETAKHQAKCNICKECPIIGFRYRSLKHFNYDICQSCFFSGRVAKGHKMHYPMVEYCTPTTSGEDVRDFAKVLKNKFRTKRYFAKHPRMGYLPVQTVLEGDNMETPASSPQLSHDDTHSRIEHYASRLAEMENSNGSYLNDSISPNESIDDEHLLIQHYCQSLNQDSPLSQPRSPAQILISLESEERGELERILADLEEENRNLQAEYDRLKQQHEHKGLSPLPSPPEMMPTSPQSPRDAELIAEAKLLRQHKGRLEARMQILEDHNKQLESQLHRLRQLLEQPQAEAKVNGTTVSSPSTSLQRSDSSQPMLLRVVGSQTSDSMGEEDLLSPPQDTSTGLEEVMEQLNNSFPSSRGRNTPGKPMREDTM

SEQ ID NO: 26 - DNA, 4552 bp, Homo sapiens
actttcggggagcccggcggctctgggaagctcactcctccactcgtacccacactcgaccgcggagcccttgcagccatgagggaacagctcaaaggccacgagactcaaacaacttgctgggaccatcccaaaatgacagagctctaccagtctttagctgacctgaataatgtcagattctcagcttataggactgccatgaaactccgaagactgcagaaggccctttgcttggatctcttgagcctgtcagctgcatgtgatgccttggaccagcacaacctcaagcaaaatgaccagcccatggatatcctgcagattattaattgtttgaccactatttatgaccgcctggagcaagagcacaacaatttggtcaacgtccctctctgcgtggatatgtgtctgaactggctgctgaatgtttatgatacgggacgaacagggaggatccgtgtcctgtcttttaaaactggcatcatttccctgtgtaaagcacatttggaagacaagtacagataccttttcaagcaagtggcaagttcaacaggattttgtgaccagcgcaggctgggcctccttctgcatgattctatccaaattccaagacagttgggtgaagttgcatcctttgggggcagtaacattgagccaagtgtccggagctgcttccaatttgctaataataagccagagatcgaagcggccctcttcctagactggatgagactggaaccccagtccatggtgtggctgcccgtcctgcacagagtggctgctgcagaaactgccaagcatcaggccaaatgtaacatctgcaaagagtgtccaatcattggattcaggtacaggagtctaaagcactttaattatgacatctgccaaagctgctttttttctggtcgagttgcaaaaggccataaaatgcactatcccatggtggaatattgcactccgactacatcaggagaagatgttcgagactttgccaaggtactaaaaaacaaatttcgaaccaaaaggtattttgcgaagcatccccgaatgggctacctgccagtgcagactgtcttagagggggacaacatggaaacgcctgcctcgtcccctcagctttcacacgatgatactcattcacgcattgaacattatgctagcaggctagcagaaatggaaaacagcaatggatcttatctaaatgatagcatctctcctaatgagagcatagatgatgaacatttgttaatccagcattactgccaaagtttgaaccaggactcccccctgagccagcctcgtagtcctgcccagatcttgatttccttagagagtgaggaaagaggggagctagagagaatcctagcagatcttgaggaagaaaacaggaatctgcaagcagaatatgaccgtctaaagcagcagcacgaacataaaggcctgtccccactgccgtcccctcctgaaatgatgcccacctctccccagagtccccgggatgctgagctcattgctgaggccaagctactgcgtcaacacaaaggccgcctggaagccaggatgcaaatcctggaagaccacaataaacagctggagtcacagttacacaggctaaggcagctgctggagcaaccccaggcagaggccaaagtgaatggcacaacggtgtcctctccttctacctctctacagaggtccgacagcagtcagcctatgctgctccgagtggttggcagtcaaacttcggactccatgggtgaggaagatcttctcagtcctccccaggacacaagcacagggttagaggaggtgatggagcaactcaacaactccttccctagttcaagaggacacaatgtaggaagtcttttccacatggcagatgatttgggcagagcgatggagtccttagtatcagtcatgacagatgaagaaggagcagaataaatgttttacaactcctgattcccgcatggtttttataatattcatacaacaaagaggattagacagtaagagtttacaagaaataaatctatatttttgtgaagggtagtggtattatactgtagatttcagtagtttctaagtctgttattgttttgttaacaatggcaggttttacacgtctatgcaattgtacaaaaaagttataagaaaactacatgtaaaatcttgatagctaaataacttgccatttctttatatggaacgcattttgggttgtttaaaaatttataacagttataaagaaagattgtaaactaaagtgtgctttataaaaaaaagttgtttataaaaacccctaaaaacaaaacaaacacacacacacacacatacacacacacacacaaaactttgaggcagcgcattgttttgcatccttttggcgtgatatccatatgaaattcatggctttttctttttttgcatattaaagataagacttcctctaccaccacaccaaatgactactacacactgctcatttgagaactgtcagctgagtggggcaggcttgagttttcatttcatatatctatatgtctataagtatataaatactatagttatatagataaagagatacgaatttctatagactgactttttccattttttaaatgttcatgtcacatcctaatagaaagaaattacttctagtcagtcatccaggcttacctgcttggtctagaatggatttttcccggagccggaagccaggaggaaactacaccacactaaaacattgtctacagctccagatgtttctcattttaaacaactttccactgacaacgaaagtaaagtaaagtattggatttttttaaagggaacatgtgaatgaatacacaggacttattatatcagagtgagtaatcggttggttggttgattgattgattgattgatacattcagcttcctgctgctagcaatgccacgatttagatttaatgatgcttcagtggaaatcaatcagaaggtattctgaccttgtgaacatcagaaggtattttttaactcccaagcagtagcaggacgatgatagggctggagggctatggattcccagcccatccctgtgaaggagtaggccactctttaagtgaaggattggatgattgttcataatacataaagttctctgtaattacaactaaattattatgccctcttctcacagtcaaaaggaactgggtggtttggtttttgttgcttttttagatttattgtcccatgtgggatgagtttttaaatgccacaagacataatttaaaataaataaactttgggaaaaggtgtaaaacagtagccccatcacatttgtgatactgacaggtatcaacccagaagcccatgaactgtgtttccatcctttgcatttctctgcgagtagttccacacaggtttgtaagtaagtaagaaagaaggcaaattgattcaaatgttacaaaaaaacccttcttggtggattagacaggttaaatatataaacaaacaaacaaaaattgctcaaaaaagaggagaaaagctcaagaggaaaagctaaggactggtaggaaaaagctttactctttcatgccattttatttctttttgatttttaaatcattcattcaatagataccaccgtgtgacctataattttgcaaatctgttacctctgacatcaagtgtaattagcttttggagagtgggctgacatcaagtgtaattagcttttggagagtgggttttgtccattattaataattaattaattaacatcaaacacggcttctcatgctatttctacctcactttggttttggggtgttcctgataattgtgcacacctgagttcacagcttcaccacttgtccattgcgttattttctttttcctttataattctttctttttccttcataattttcaaaagaaaacccaaagctctaaggtaacaaattaccaaattacatgaagatttggtttttgtcttgcatttttttcctttatgtgacgctggaccttttctttacccaaggatttttaaaactcagatttaaaacaaggggttactttacatcctactaagaagtttaagtaagtaagtttcattctaaaatcagaggtaaatagagtgcataaataattttgttttaatctttttgtttttcttttagacacattagctctggagtgagtctgtcataatatttgaacaaaaattgagagctttattgctgcattttaagcataattaatttggacattatttcgtgttgtgttctttataaccaccaagtattaaactgtaaatcataatgtaactgaagcataaacatcacatggcatgttttgtcattgttttcaggtactgagttcttacttgagtatcataatatattgtgttttaacaccaacactgtaacatttacgaattatttttttaaacttcagttttactgcattttcacaacatatcagacttcaccaaatatatgccttactattgtattatagtactgctttactgtgtatctcaataaagcacgcagttatgttac

SEQ ID NO: 27 - protein, 622 aa, Homo sapiens
MREQLKGHETQTTCWDHPKMTELYQSLADLNNVRFSAYRTAMKLRRLQKALCLDLLSLSAACDALDQHNLKQNDQPMDILQIINCLTTIYDRLEQEHNNLVNVPLCVDMCLNWLLNVYDTGRTGRIRVLSFKTGIISLCKAHLEDKYRYLFKQVASSTGFCDQRRLGLLLHDSIQIPRQLGEVASFGGSNIEPSVRSCFQFANNKPEIEAALFLDWMRLEPQSMVWLPVLHRVAAAETAKHQAKCNICKECPIIGFRYRSLKHFNYDICQSCFFSGRVAKGHKMHYPMVEYCTPTTSGEDVRDFAKVLKNKFRTKRYFAKHPRMGYLPVQTVLEGDNMETPASSPQLSHDDTHSRIEHYASRLAEMENSNGSYLNDSISPNESIDDEHLLIQHYCQSLNQDSPLSQPRSPAQILISLESEERGELERILADLEEENRNLQAEYDRLKQQHEHKGLSPLPSPPEMMPTSPQSPRDAELIAEAKLLRQHKGRLEARMQILEDHNKQLESQLHRLRQLLEQPQAEAKVNGTTVSSPSTSLQRSDSSQPMLLRVVGSQTSDSMGEEDLLSPPQDTSTGLEEVMEQLNNSFPSSRGHNVGSLFHMADDLGRAMESLVSVMTDEEGAE

SEQ ID NO: 28 - DNA, 1571 bp, Homo sapiens
actttcggggagcccggcggctctgggaagctcactcctccactcgtacccacactcgaccgcggagcccttgcagccatgagggaacagctcaaaggccacgagactcaaacaacttgctgggaccatcccaaaatgacagagctctaccagtctttagctgacctgaataatgtcagattctcagcttataggactgccatgaaactccgaagactgcagaaggccctttgcttggatctcttgagcctgtcagctgcatgtgatgccttggaccagcacaacctcaagcaaaatgaccagcccatggatatcctgcagattattaattgtttgaccactatttatgaccgcctggagcaagagcacaacaatttggtcaacgtccctctctgcgtggatatgtgtctgaactggctgctgaatgtttatgatacgggacgaacagggaggatccgtgtcctgtcttttaaaactggcatcatttccctgtgtaaagcacatttggaagacaagtacagataccttttcaagcaagtggcaagttcaacaggattttgtgaccagcgcaggctgggcctccttctgcatgattctatccaaattccaagacagttgggtgaagttgcatcctttgggggcagtaacattgagccaagtgtccggagctgcttccaatttgctaataataagccagagatcgaagcggccctcttcctagactggatgagactggaaccccagtccatggtgtggctgcccgtcctgcacagagtggctgctgcagaaactgccaagcatcaggccaaatgtaacatctgcaaagagtgtccaatcattggattcaggtacaggagtctaaagcactttaattatgacatctgccaaagctgctttttttctggtcgagttgcaaaaggccataaaatgcactatcccatggtggaatattgcactccgactacatcaggagaagatgttcgagactttgccaaggtactaaaaaacaaatttcgaaccaaaaggtattttgcgaagcatccccgaatgggctacctgccagtgcagactgtcttagagggggacaacatggaaacgtgagtagtagcaaaagcagaacacactcttgtttgatgtatatttgaactcctctcagctgaacaccctccttcactcccaaatgcaaacagtctcttctatttctttctttttatttacattagctgaaaagagaaaaataagctgatgtccagttgccactttcccacgtcacttgacaatttctttttccaaaagttaaactttatctcacagggggaaaaaaaaaaaaaaaccacaacacaatacagccactaattgccttacaagccttataagaaatatgggactgtttacaaatgagtgattccagtatttcattttgattttcctctctcacaaatcagtaaatgtgtgtctttttgtatctcattgtgtggtcatatctagtcacttgtttctactcaaaagaaaatatagtcacaggaaactacttcacagtaagtagtaatgattctcaagatcaaagggga

SEQ ID NO: 29 - protein, 340 aa, Homo sapiens
MREQLKGHETQTTCWDHPKMTELYQSLADLNNVRFSAYRTAMKLRRLQKALCLDLLSLSAACDALDQHNLKQNDQPMDILQIINCLTTIYDRLEQEHNNLVNVPLCVDMCLNWLLNVYDTGRTGRIRVLSFKTGIISLCKAHLEDKYRYLFKQVASSTGFCDQRRLGLLLHDSIQIPRQLGEVASFGGSNIEPSVRSCFQFANNKPEIEAALFLDWMRLEPQSMVWLPVLHRVAAAETAKHQAKCNICKECPIIGFRYRSLKHFNYDICQSCFFSGRVAKGHKMHYPMVEYCTPTTSGEDVRDFAKVLKNKFRTKRYFAKHPRMGYLPVQTVLEGDNMET

SEQ ID NO: 30 - DNA, 7080 bp, Homo sapiens
acactagcaatggcaaagctttgtgcggaggcattgctggctgctctgaactaaaagcatccgtggggaccgaaagaggtttttgcacaccttattaaggaactccaggatggcattgggcagcggcaaactgttgtcagaacattgaatgcaactggggaagaaataattcagcaatcctcaaaaacagatgccagtattctacaggaaaaattgggaagcctgaatctgcggtggcaggaggtctgcaaacagctgtcagacagaaaaaagaggctagaagaacaaaagaatatcttgtcagaatttcaaagagatttaaatgaatttgttttatggttggaggaagcagataacattgctagtatcccacttgaacctggaaaagagcagcaactaaaagaaaagcttgagcaagtcaagttactggtggaagagttgcccctgcgccagggaattctcaaacaattaaatgaaactggaggacccgtgcttgtaagtgctcccataagcccagaagagcaagataaacttgaaaataagctcaagcagacaaatctccagtggataaaggtttccagagctttacctgagaaacaaggagaaattgaagctcaaataaaagaccttgggcagcttgaaaaaaagcttgaagaccttgaagagcagttaaatcatctgctgctgtggttatctcctattaggaatcagttggaaatttataaccaaccaaaccaagaaggaccatttgacgttcaggaaactgaaatagcagttcaagctaaacaaccggatgtggaagagattttgtctaaagggcagcatttgtacaaggaaaaaccagccactcagccagtgaagaggaagttagaagatctgagctctgagtggaaggcggtaaaccgtttacttcaagagctgagggcaaagcagcctgacctagctcctggactgaccactattggagcctctcctactcagactgttactctggtgacacaacctgtggttactaaggaaactgccatctccaaactagaaatgccatcttccttgatgttggaggtacctgctctggcagatttcaaccgggcttggacagaacttaccgactggctttctctgcttgatcaagttataaaatcacagagggtgatggtgggtgaccttgaggatatcaacgagatgatcatcaagcagaaggcaacaatgcaggatttggaacagaggcgtccccagttggaagaactcattaccgctgcccaaaatttgaaaaacaagaccagcaatcaagaggctagaacaatcattacggatcgaattgaaagaattcagaatcagtgggatgaagtacaagaacaccttcagaaccggaggcaacagttgaatgaaatgttaaaggattcaacacaatggctggaagctaaggaagaagctgagcaggtcttaggacaggccagagccaagcttgagtcatggaaggagggtccctatacagtagatgcaatccaaaagaaaatcacagaaaccaagcagttggccaaagacctccgccagtggcagacaaatgtagatgtggcaaatgacttggccctgaaacttctccgggattattctgcagatgataccagaaaagtccacatgataacagagaatatcaatgcctcttggagaagcattcataaaagggtgagtgagcgagaggctgctttggaagaaactcatagattactgcaacagttccccctggacctggaaaagtttcttgcctggcttacagaagctgaaacaactgccaatgtcctacaggatgctacccgtaaggaaaggctcctagaagactccaagggagtaaaagagctgatgaaacaatggcaagacctccaaggtgaaattgaagctcacacagatgtttatcacaacctggatgaaaacagccaaaaaatcctgagatccctggaaggttccgatgatgcagtcctgttacaaagacgtttggataacatgaacttcaagtggagtgaacttcggaaaaagtctctcaacattaggtcccatttggaagccagttctgaccagtggaagcgtctgcacctttctctgcaggaacttctggtgtggctacagctgaaagatgatgaattaagccggcaggcacctattggaggcgactttccagcagttcagaagcagaacgatgtacatagggccttcaagagggaattgaaaactaaagaacctgtaatcatgagtactcttgagactgtacgaatatttctgacagagcagcctttggaaggactagagaaactctaccaggagcccagagagctgcctcctgaggagagagcccagaatgtcactcggcttctacgaaagcaggctgaggaggtcaatactgagtgggaaaaattgaacctgcactccgctgactggcagagaaaaatagatgagacccttgaaagactccaggaacttcaagaggccacggatgagctggacctcaagctgcgccaagctgaggtgatcaagggatcctggcagcccgtgggcgatctcctcattgactctctccaagatcacctcgagaaagtcaaggcacttcgaggagaaattgcgcctctgaaagagaacgtgagccacgtcaatgaccttgctcgccagcttaccactttgggcattcagctctcaccgtataacctcagcactctggaagacctgaacaccagatggaagcttctgcaggtggccgtcgaggaccgagtcaggcagctgcatgaagcccacagggactttggtccagcatctcagcactttctttccacgtctgtccagggtccctgggagagagccatctcgccaaacaaagtgccctactatatcaaccacgagactcaaacaacttgctgggaccatcccaaaatgacagagctctaccagtctttagctgacctgaataatgtcagattctcagcttataggactgccatgaaactccgaagactgcagaaggccctttgcttggatctcttgagcctgtcagctgcatgtgatgccttggaccagcacaacctcaagcaaaatgaccagcccatggatatcctgcagattattaattgtttgaccactatttatgaccgcctggagcaagagcacaacaatttggtcaacgtccctctctgcgtggatatgtgtctgaactggctgctgaatgtttatgatacgggacgaacagggaggatccgtgtcctgtcttttaaaactggcatcatttccctgtgtaaagcacatttggaagacaagtacagataccttttcaagcaagtggcaagttcaacaggattttgtgaccagcgcaggctgggcctccttctgcatgattctatccaaattccaagacagttgggtgaagttgcatcctttgggggcagtaacattgagccaagtgtccggagctgcttccaatttgctaataataagccagagatcgaagcggccctcttcctagactggatgagactggaaccccagtccatggtgtggctgcccgtcctgcacagagtggctgctgcagaaactgccaagcatcaggccaaatgtaacatctgcaaagagtgtccaatcattggattcaggtacaggagtctaaagcactttaattatgacatctgccaaagctgctttttttctggtcgagttgcaaaaggccataaaatgcactatcccatggtggaatattgcactccgactacatcaggagaagatgttcgagactttgccaaggtactaaaaaacaaatttcgaaccaaaaggtattttgcgaagcatccccgaatgggctacctgccagtgcagactgtcttagagggggacaacatggaaacgaatctgcaagcagaatatgaccgtctaaagcagcagcacgaacataaaggcctgtccccactgccgtcccctcctgaaatgatgcccacctctccccagagtccccgggatgctgagctcattgctgaggccaagctactgcgtcaacacaaaggccgcctggaagccaggatgcaaatcctggaagaccacaataaacagctggagtcacagttacacaggctaaggcagctgctggagcaaccccaggcagaggccaaagtgaatggcacaacggtgtcctctccttctacctctctacagaggtccgacagcagtcagcctatgctgctccgagtggttggcagtcaaacttcggactccatgggtgaggaagatcttctcagtcctccccaggacacaagcacagggttagaggaggtgatggagcaactcaacaactccttccctagttcaagaggaagaaatacccctggaaagccaatgagagaggacacaatgtaggaagtcttttccacatggcagatgatttgggcagagcgatggagtccttagtatcagtcatgacagatgaagaaggagcagaataaatgttttacaactcctgattcccgcatggtttttataatattcatacaacaaagaggattagacagtaagagtttacaagaaataaatctatatttttgtgaagggtagtggtattatactgtagatttcagtagtttctaagtctgttattgttttgttaacaatggcaggttttacacgtctatgcaattgtacaaaaaagttataagaaaactacatgtaaaatcttgatagctaaataacttgccatttctttatatggaacgcattttgggttgtttaaaaatttataacagttataaagaaagattgtaaactaaagtgtgctttataaaaaaaagttgtttataaaaacccctaaaaacaaaacaaacacacacacacacacatacacacacacacacaaaactttgaggcagcgcattgttttgcatccttttggcgtgatatccatatgaaattcatggctttttctttttttgcatattaaagataagacttcctctaccaccacaccaaatgactactacacactgctcatttgagaactgtcagctgagtggggcaggcttgagttttcatttcatatatctatatgtctataagtatataaatactatagttatatagataaagagatacgaatttctatagactgactttttccattttttaaatgttcatgtcacatcctaatagaaagaaattacttctagtcagtcatccaggcttacctgcttggtctagaatggatttttcccggagccggaagccaggaggaaactacaccacactaaaacattgtctacagctccagatgtttctcattttaaacaactttccactgacaacgaaagtaaagtaaagtattggatttttttaaagggaacatgtgaatgaatacacaggacttattatatcagagtgagtaatcggttggttggttgattgattgattgattgatacattcagcttcctgctgctagcaatgccacgatttagatttaatgatgcttcagtggaaatcaatcagaaggtattctgaccttgtgaacatcagaaggtattttttaactcccaagcagtagcaggacgatgatagggctggagggctatggattcccagcccatccctgtgaaggagtaggccactctttaagtgaaggattggatgattgttcataatacataaagttctctgtaattacaactaaattattatgccctcttctcacagtcaaaaggaactgggtggtttggtttttgttgcttttttagatttattgtcccatgtgggatgagtttttaaatgccacaagacataatttaaaataaataaactttgggaaaaggtgtaaaacagtagccccatcacatttgtgatactgacaggtatcaacccagaagcccatgaactgtgtttccatcctttgcatttctctgcgagtagttccacacaggtttgtaagtaagtaagaaagaaggcaaattgattcaaatgttacaaaaaaacccttcttggtggattagacaggttaaatatataaacaaacaaacaaaaattgctcaaaaaagaggagaaaagctcaagaggaaaagctaaggactggtaggaaaaagctttactctttcatgccattttatttctttttgatttttaaatcattcattcaatagataccaccgtgtgacctataattttgcaaatctgttacctctgacatcaagtgtaattagcttttggagagtgggctgacatcaagtgtaattagcttttggagagtgggttttgtccattattaataattaattaattaacatcaaacacggcttctcatgctatttctacctcactttggttttggggtgttcctgataattgtgcacacctgagttcacagcttcaccacttgtccattgcgttattttctttttcctttataattctttctttttccttcataattttcaaaagaaaacccaaagctctaaggtaacaaattaccaaattacatgaagatttggtttttgtcttgcatttttttcctttatgtgacgctggaccttttctttacccaaggatttttaaaactcagatttaaaacaaggggttactttacatcctactaagaagtttaagtaagtaagtttcattctaaaatcagaggtaaatagagtgcataaataattttgttttaatctttttgtttttcttttagacacattagctctggagtgagtctgtcataatatttgaacaaaaattgagagctttattgctgcattttaagcataattaatttggacattatttcgtgttgtgttctttataaccaccaagtattaaactgtaaatcataatgtaactgaagcataaacatcacatggcatgttttgtcattgttttcaggtactgagttcttacttgagtatcataatatattgtgttttaacaccaacactgtaacatttacgaattatttttttaaacttcagttttactgcattttcacaacatatcagacttcaccaaatatatgccttactattgtattatagtactgctttactgtgtatctcaataaagcacgcagttatgttac

SEQ ID NO: 31 - protein, 1115 aa, Homo sapiens
MPSSLMLEVPALADFNRAWTELTDWLSLLDQVIKSQRVMVGDLEDINEMIIKQKATMQDLEQRRPQLEELITAAQNLKNKTSNQEARTIITDRIERIQNQWDEVQEHLQNRRQQLNEMLKDSTQWLEAKEEAEQVLGQARAKLESWKEGPYTVDAIQKKITETKQLAKDLRQWQTNVDVANDLALKLLRDYSADDTRKVHMITENINASWRSIHKRVSEREAALEETHRLLQQFPLDLEKFLAWLTEAETTANVLQDATRKERLLEDSKGVKELMKQWQDLQGEIEAHTDVYHNLDENSQKILRSLEGSDDAVLLQRRLDNMNFKWSELRKKSLNIRSHLEASSDQWKRLHLSLQELLVWLQLKDDELSRQAPIGGDFPAVQKQNDVHRAFKRELKTKEPVIMSTLETVRIFLTEQPLEGLEKLYQEPRELPPEERAQNVTRLLRKQAEEVNTEWEKLNLHSADWQRKIDETLERLQELQEATDELDLKLRQAEVIKGSWQPVGDLLIDSLQDHLEKVKALRGEIAPLKENVSHVNDLARQLTTLGIQLSPYNLSTLEDLNTRWKLLQVAVEDRVRQLHEAHRDFGPASQHFLSTSVQGPWERAISPNKVPYYINHETQTTCWDHPKMTELYQSLADLNNVRFSAYRTAMKLRRLQKALCLDLLSLSAACDALDQHNLKQNDQPMDILQIINCLTTIYDRLEQEHNNLVNVPLCVDMCLNWLLNVYDTGRTGRIRVLSFKTGIISLCKAHLEDKYRYLFKQVASSTGFCDQRRLGLLLHDSIQIPRQLGEVASFGGSNIEPSVRSCFQFANNKPEIEAALFLDWMRLEPQSMVWLPVLHRVAAAETAKHQAKCNICKECPIIGFRYRSLKHFNYDICQSCFFSGRVAKGHKMHYPMVEYCTPTTSGEDVRDFAKVLKNKFRTKRYFAKHPRMGYLPVQTVLEGDNMETNLQAEYDRLKQQHEHKGLSPLPSPPEMMPTSPQSPRDAELIAEAKLLRQHKGRLEARMQILEDHNKQLESQLHRLRQLLEQPQAEAKVNGTTVSSPSTSLQRSDSSQPMLLRVVGSQTSDSMGEEDLLSPPQDTSTGLEEVMEQLNNSFPSSRGRNTPGKPMREDTM

SEQ ID NO: 32 - DNA, 7378 bp, Homo sapiens
acactagcaatggcaaagctttgtgcggaggcattgctggctgctctgaactaaaagcatccgtggggaccgaaagaggtttttgcacaccttattaaggaactccaggatggcattgggcagcggcaaactgttgtcagaacattgaatgcaactggggaagaaataattcagcaatcctcaaaaacagatgccagtattctacaggaaaaattgggaagcctgaatctgcggtggcaggaggtctgcaaacagctgtcagacagaaaaaagaggctagaagaacaaaagaatatcttgtcagaatttcaaagagatttaaatgaatttgttttatggttggaggaagcagataacattgctagtatcccacttgaacctggaaaagagcagcaactaaaagaaaagcttgagcaagtcaagttactggtggaagagttgcccctgcgccagggaattctcaaacaattaaatgaaactggaggacccgtgcttgtaagtgctcccataagcccagaagagcaagataaacttgaaaataagctcaagcagacaaatctccagtggataaaggtttccagagctttacctgagaaacaaggagaaattgaagctcaaataaaagaccttgggcagcttgaaaaaaagcttgaagaccttgaagagcagttaaatcatctgctgctgtggttatctcctattaggaatcagttggaaatttataaccaaccaaaccaagaaggaccatttgacgttcaggaaactgaaatagcagttcaagctaaacaaccggatgtggaagagattttgtctaaagggcagcatttgtacaaggaaaaaccagccactcagccagtgaagaggaagttagaagatctgagctctgagtggaaggcggtaaaccgtttacttcaagagctgagggcaaagcagcctgacctagctcctggactgaccactattggagcctctcctactcagactgttactctggtgacacaacctgtggttactaaggaaactgccatctccaaactagaaatgccatcttccttgatgttggaggtacctgctctggcagatttcaaccgggcttggacagaacttaccgactggctttctctgcttgatcaagttataaaatcacagagggtgatggtgggtgaccttgaggatatcaacgagatgatcatcaagcagaaggcaacaatgcaggatttggaacagaggcgtccccagttggaagaactcattaccgctgcccaaaatttgaaaaacaagaccagcaatcaagaggctagaacaatcattacggatcgaattgaaagaattcagaatcagtgggatgaagtacaagaacaccttcagaaccggaggcaacagttgaatgaaatgttaaaggattcaacacaatggctggaagctaaggaagaagctgagcaggtcttaggacaggccagagccaagcttgagtcatggaaggagggtccctatacagtagatgcaatccaaaagaaaatcacagaaaccaagcagttggccaaagacctccgccagtggcagacaaatgtagatgtggcaaatgacttggccctgaaacttctccgggattattctgcagatgataccagaaaagtccacatgataacagagaatatcaatgcctcttggagaagcattcataaaagggtgagtgagcgagaggctgctttggaagaaactcatagattactgcaacagttccccctggacctggaaaagtttcttgcctggcttacagaagctgaaacaactgccaatgtcctacaggatgctacccgtaaggaaaggctcctagaagactccaagggagtaaaagagctgatgaaacaatggcaagacctccaaggtgaaattgaagctcacacagatgtttatcacaacctggatgaaaacagccaaaaaatcctgagatccctggaaggttccgatgatgcagtcctgttacaaagacgtttggataacatgaacttcaagtggagtgaacttcggaaaaagtctctcaacattaggtcccatttggaagccagttctgaccagtggaagcgtctgcacctttctctgcaggaacttctggtgtggctacagctgaaagatgatgaattaagccggcaggcacctattggaggcgactttccagcagttcagaagcagaacgatgtacatagggccttcaagagggaattgaaaactaaagaacctgtaatcatgagtactcttgagactgtacgaatatttctgacagagcagcctttggaaggactagagaaactctaccaggagcccagagagctgcctcctgaggagagagcccagaatgtcactcggcttctacgaaagcaggctgaggaggtcaatactgagtgggaaaaattgaacctgcactccgctgactggcagagaaaaatagatgagacccttgaaagactccaggaacttcaagaggccacggatgagctggacctcaagctgcgccaagctgaggtgatcaagggatcctggcagcccgtgggcgatctcctcattgactctctccaagatcacctcgagaaagtcaaggcacttcgaggagaaattgcgcctctgaaagagaacgtgagccacgtcaatgaccttgctcgccagcttaccactttgggcattcagctctcaccgtataacctcagcactctggaagacctgaacaccagatggaagcttctgcaggtggccgtcgaggaccgagtcaggcagctgcatgaagcccacagggactttggtccagcatctcagcactttctttccacgtctgtccagggtccctgggagagagccatctcgccaaacaaagtgccctactatatcaaccacgagactcaaacaacttgctgggaccatcccaaaatgacagagctctaccagtctttagctgacctgaataatgtcagattctcagcttataggactgccatgaaactccgaagactgcagaaggccctttgcttggatctcttgagcctgtcagctgcatgtgatgccttggaccagcacaacctcaagcaaaatgaccagcccatggatatcctgcagattattaattgtttgaccactatttatgaccgcctggagcaagagcacaacaatttggtcaacgtccctctctgcgtggatatgtgtctgaactggctgctgaatgtttatgatacgggacgaacagggaggatccgtgtcctgtcttttaaaactggcatcatttccctgtgtaaagcacatttggaagacaagtacagataccttttcaagcaagtggcaagttcaacaggattttgtgaccagcgcaggctgggcctccttctgcatgattctatccaaattccaagacagttgggtgaagttgcatcctttgggggcagtaacattgagccaagtgtccggagctgcttccaatttgctaataataagccagagatcgaagcggccctcttcctagactggatgagactggaaccccagtccatggtgtggctgcccgtcctgcacagagtggctgctgcagaaactgccaagcatcaggccaaatgtaacatctgcaaagagtgtccaatcattggattcaggtacaggagtctaaagcactttaattatgacatctgccaaagctgctttttttctggtcgagttgcaaaaggccataaaatgcactatcccatggtggaatattgcactccgactacatcaggagaagatgttcgagactttgccaaggtactaaaaaacaaatttcgaaccaaaaggtattttgcgaagcatccccgaatgggctacctgccagtgcagactgtcttagagggggacaacatggaaactcccgttactctgatcaacttctggccagtagattctgcgcctgcctcgtcccctcagctttcacacgatgatactcattcacgcattgaacattatgctagcaggctagcagaaatggaaaacagcaatggatcttatctaaatgatagcatctctcctaatgagagcatagatgatgaacatttgttaatccagcattactgccaaagtttgaaccaggactcccccctgagccagcctcgtagtcctgcccagatcttgatttccttagagagtgaggaaagaggggagctagagagaatcctagcagatcttgaggaagaaaacaggaatctgcaagcagaatatgaccgtctaaagcagcagcacgaacataaaggcctgtccccactgccgtcccctcctgaaatgatgcccacctctccccagagtccccgggatgctgagctcattgctgaggccaagctactgcgtcaacacaaaggccgcctggaagccaggatgcaaatcctggaagaccacaataaacagctggagtcacagttacacaggctaaggcagctgctggagcaaccccaggcagaggccaaagtgaatggcacaacggtgtcctctccttctacctctctacagaggtccgacagcagtcagcctatgctgctccgagtggttggcagtcaaacttcggactccatgggtgaggaagatcttctcagtcctccccaggacacaagcacagggttagaggaggtgatggagcaactcaacaactccttccctagttcaagaggacacaatgtaggaagtcttttccacatggcagatgatttgggcagagcgatggagtccttagtatcagtcatgacagatgaagaaggagcagaataaatgttttacaactcctgattcccgcatggtttttataatattcatacaacaaagaggattagacagtaagagtttacaagaaataaatctatatttttgtgaagggtagtggtattatactgtagatttcagtagtttctaagtctgttattgttttgttaacaatggcaggttttacacgtctatgcaattgtacaaaaaagttataagaaaactacatgtaaaatcttgatagctaaataacttgccatttctttatatggaacgcattttgggttgtttaaaaatttataacagttataaagaaagattgtaaactaaagtgtgctttataaaaaaaagttgtttataaaaacccctaaaaacaaaacaaacacacacacacacacatacacacacacacacaaaactttgaggcagcgcattgttttgcatccttttggcgtgatatccatatgaaattcatggctttttctttttttgcatattaaagataagacttcctctaccaccacaccaaatgactactacacactgctcatttgagaactgtcagctgagtggggcaggcttgagttttcatttcatatatctatatgtctataagtatataaatactatagttatatagataaagagatacgaatttctatagactgactttttccattttttaaatgttcatgtcacatcctaatagaaagaaattacttctagtcagtcatccaggcttacctgcttggtctagaatggatttttcccggagccggaagccaggaggaaactacaccacactaaaacattgtctacagctccagatgtttctcattttaaacaactttccactgacaacgaaagtaaagtaaagtattggatttttttaaagggaacatgtgaatgaatacacaggacttattatatcagagtgagtaatcggttggttggttgattgattgattgattgatacattcagcttcctgctgctagcaatgccacgatttagatttaatgatgcttcagtggaaatcaatcagaaggtattctgaccttgtgaacatcagaaggtattttttaactcccaagcagtagcaggacgatgatagggctggagggctatggattcccagcccatccctgtgaaggagtaggccactctttaagtgaaggattggatgattgttcataatacataaagttctctgtaattacaactaaattattatgccctcttctcacagtcaaaaggaactgggtggtttggtttttgttgcttttttagatttattgtcccatgtgggatgagtttttaaatgccacaagacataatttaaaataaataaactttgggaaaaggtgtaaaacagtagccccatcacatttgtgatactgacaggtatcaacccagaagcccatgaactgtgtttccatcctttgcatttctctgcgagtagttccacacaggtttgtaagtaagtaagaaagaaggcaaattgattcaaatgttacaaaaaaacccttcttggtggattagacaggttaaatatataaacaaacaaacaaaaattgctcaaaaaagaggagaaaagctcaagaggaaaagctaaggactggtaggaaaaagctttactctttcatgccattttatttctttttgatttttaaatcattcattcaatagataccaccgtgtgacctataattttgcaaatctgttacctctgacatcaagtgtaattagcttttggagagtgggctgacatcaagtgtaattagcttttggagagtgggttttgtccattattaataattaattaattaacatcaaacacggcttctcatgctatttctacctcactttggttttggggtgttcctgataattgtgcacacctgagttcacagcttcaccacttgtccattgcgttattttctttttcctttataattctttctttttccttcataattttcaaaagaaaacccaaagctctaaggtaacaaattaccaaattacatgaagatttggtttttgtcttgcatttttttcctttatgtgacgctggaccttttctttacccaaggatttttaaaactcagatttaaaacaaggggttactttacatcctactaagaagtttaagtaagtaagtttcattctaaaatcagaggtaaatagagtgcataaataattttgttttaatctttttgtttttcttttagacacattagctctggagtgagtctgtcataatatttgaacaaaaattgagagctttattgctgcattttaagcataattaatttggacattatttcgtgttgtgttctttataaccaccaagtattaaactgtaaatcataatgtaactgaagcataaacatcacatggcatgttttgtcattgttttcaggtactgagttcttacttgagtatcataatatattgtgttttaacaccaacactgtaacatttacgaattatttttttaaacttcagttttactgcattttcacaacatatcagacttcaccaaatatatgccttactattgtattatagtactgctttactgtgtatctcaataaagcacgcagttatgttac

SEQ ID NO: 33 - protein, 1243 aa, Homo sapiens
MPSSLMLEVPALADFNRAWTELTDWLSLLDQVIKSQRVMVGDLEDINEMIIKQKATMQDLEQRRPQLEELITAAQNLKNKTSNQEARTIITDRIERIQNQWDEVQEHLQNRRQQLNEMLKDSTQWLEAKEEAEQVLGQARAKLESWKEGPYTVDAIQKKITETKQLAKDLRQWQTNVDVANDLALKLLRDYSADDTRKVHMITENINASWRSIHKRVSEREAALEETHRLLQQFPLDLEKFLAWLTEAETTANVLQDATRKERLLEDSKGVKELMKQWQDLQGEIEAHTDVYHNLDENSQKILRSLEGSDDAVLLQRRLDNMNFKWSELRKKSLNIRSHLEASSDQWKRLHLSLQELLVWLQLKDDELSRQAPIGGDFPAVQKQNDVHRAFKRELKTKEPVIMSTLETVRIFLTEQPLEGLEKLYQEPRELPPEERAQNVTRLLRKQAEEVNTEWEKLNLHSADWQRKIDETLERLQELQEATDELDLKLRQAEVIKGSWQPVGDLLIDSLQDHLEKVKALRGEIAPLKENVSHVNDLARQLTTLGIQLSPYNLSTLEDLNTRWKLLQVAVEDRVRQLHEAHRDFGPASQHFLSTSVQGPWERAISPNKVPYYINHETQTTCWDHPKMTELYQSLADLNNVRFSAYRTAMKLRRLQKALCLDLLSLSAACDALDQHNLKQNDQPMDILQIINCLTTIYDRLEQEHNNLVNVPLCVDMCLNWLLNVYDTGRTGRIRVLSFKTGIISLCKAHLEDKYRYLFKQVASSTGFCDQRRLGLLLHDSIQIPRQLGEVASFGGSNIEPSVRSCFQFANNKPEIEAALFLDWMRLEPQSMVWLPVLHRVAAAETAKHQAKCNICKECPIIGFRYRSLKHFNYDICQSCFFSGRVAKGHKMHYPMVEYCTPTTSGEDVRDFAKVLKNKFRTKRYFAKHPRMGYLPVQTVLEGDNMETPVTLINFWPVDSAPASSPQLSHDDTHSRIEHYASRLAEMENSNGSYLNDSISPNESIDDEHLLIQHYCQSLNQDSPLSQPRSPAQILISLESEERGELERILADLEEENRNLQAEYDRLKQQHEHKGLSPLPSPPEMMPTSPQSPRDAELIAEAKLLRQHKGRLEARMQILEDHNKQLESQLHRLRQLLEQPQAEAKVNGTTVSSPSTSLQRSDSSQPMLLRVVGSQTSDSMGEEDLLSPPQDTSTGLEEVMEQLNNSFPSSRGHNVGSLFHMADDLGRAMESLVSVMTDEEGAE

SEQ ID NO: 34 - DNA, 7339 bp, Homo sapiens
acactagcaatggcaaagctttgtgcggaggcattgctggctgctctgaactaaaagcatccgtggggaccgaaagaggtttttgcacaccttattaaggaactccaggatggcattgggcagcggcaaactgttgtcagaacattgaatgcaactggggaagaaataattcagcaatcctcaaaaacagatgccagtattctacaggaaaaattgggaagcctgaatctgcggtggcaggaggtctgcaaacagctgtcagacagaaaaaagaggctagaagaacaaaagaatatcttgtcagaatttcaaagagatttaaatgaatttgttttatggttggaggaagcagataacattgctagtatcccacttgaacctggaaaagagcagcaactaaaagaaaagcttgagcaagtcaagttactggtggaagagttgcccctgcgccagggaattctcaaacaattaaatgaaactggaggacccgtgcttgtaagtgctcccataagcccagaagagcaagataaacttgaaaataagctcaagcagacaaatctccagtggataaaggtttccagagctttacctgagaaacaaggagaaattgaagctcaaataaaagaccttgggcagcttgaaaaaaagcttgaagaccttgaagagcagttaaatcatctgctgctgtggttatctcctattaggaatcagttggaaatttataaccaaccaaaccaagaaggaccatttgacgttcaggaaactgaaatagcagttcaagctaaacaaccggatgtggaagagattttgtctaaagggcagcatttgtacaaggaaaaaccagccactcagccagtgaagaggaagttagaagatctgagctctgagtggaaggcggtaaaccgtttacttcaagagctgagggcaaagcagcctgacctagctcctggactgaccactattggagcctctcctactcagactgttactctggtgacacaacctgtggttactaaggaaactgccatctccaaactagaaatgccatcttccttgatgttggaggtacctgctctggcagatttcaaccgggcttggacagaacttaccgactggctttctctgcttgatcaagttataaaatcacagagggtgatggtgggtgaccttgaggatatcaacgagatgatcatcaagcagaaggcaacaatgcaggatttggaacagaggcgtccccagttggaagaactcattaccgctgcccaaaatttgaaaaacaagaccagcaatcaagaggctagaacaatcattacggatcgaattgaaagaattcagaatcagtgggatgaagtacaagaacaccttcagaaccggaggcaacagttgaatgaaatgttaaaggattcaacacaatggctggaagctaaggaagaagctgagcaggtcttaggacaggccagagccaagcttgagtcatggaaggagggtccctatacagtagatgcaatccaaaagaaaatcacagaaaccaagcagttggccaaagacctccgccagtggcagacaaatgtagatgtggcaaatgacttggccctgaaacttctccgggattattctgcagatgataccagaaaagtccacatgataacagagaatatcaatgcctcttggagaagcattcataaaagggtgagtgagcgagaggctgctttggaagaaactcatagattactgcaacagttccccctggacctggaaaagtttcttgcctggcttacagaagctgaaacaactgccaatgtcctacaggatgctacccgtaaggaaaggctcctagaagactccaagggagtaaaagagctgatgaaacaatggcaagacctccaaggtgaaattgaagctcacacagatgtttatcacaacctggatgaaaacagccaaaaaatcctgagatccctggaaggttccgatgatgcagtcctgttacaaagacgtttggataacatgaacttcaagtggagtgaacttcggaaaaagtctctcaacattaggtcccatttggaagccagttctgaccagtggaagcgtctgcacctttctctgcaggaacttctggtgtggctacagctgaaagatgatgaattaagccggcaggcacctattggaggcgactttccagcagttcagaagcagaacgatgtacatagggccttcaagagggaattgaaaactaaagaacctgtaatcatgagtactcttgagactgtacgaatatttctgacagagcagcctttggaaggactagagaaactctaccaggagcccagagagctgcctcctgaggagagagcccagaatgtcactcggcttctacgaaagcaggctgaggaggtcaatactgagtgggaaaaattgaacctgcactccgctgactggcagagaaaaatagatgagacccttgaaagactccaggaacttcaagaggccacggatgagctggacctcaagctgcgccaagctgaggtgatcaagggatcctggcagcccgtgggcgatctcctcattgactctctccaagatcacctcgagaaagtcaaggcacttcgaggagaaattgcgcctctgaaagagaacgtgagccacgtcaatgaccttgctcgccagcttaccactttgggcattcagctctcaccgtataacctcagcactctggaagacctgaacaccagatggaagcttctgcaggtggccgtcgaggaccgagtcaggcagctgcatgaagcccacagggactttggtccagcatctcagcactttctttccacgtctgtccagggtccctgggagagagccatctcgccaaacaaagtgccctactatatcaaccacgagactcaaacaacttgctgggaccatcccaaaatgacagagctctaccagtctttagctgacctgaataatgtcagattctcagcttataggactgccatgaaactccgaagactgcagaaggccctttgcttggatctcttgagcctgtcagctgcatgtgatgccttggaccagcacaacctcaagcaaaatgaccagcccatggatatcctgcagattattaattgtttgaccactatttatgaccgcctggagcaagagcacaacaatttggtcaacgtccctctctgcgtggatatgtgtctgaactggctgctgaatgtttatgatacgggacgaacagggaggatccgtgtcctgtcttttaaaactggcatcatttccctgtgtaaagcacatttggaagacaagtacagataccttttcaagcaagtggcaagttcaacaggattttgtgaccagcgcaggctgggcctccttctgcatgattctatccaaattccaagacagttgggtgaagttgcatcctttgggggcagtaacattgagccaagtgtccggagctgcttccaatttgctaataataagccagagatcgaagcggccctcttcctagactggatgagactggaaccccagtccatggtgtggctgcccgtcctgcacagagtggctgctgcagaaactgccaagcatcaggccaaatgtaacatctgcaaagagtgtccaatcattggattcaggtacaggagtctaaagcactttaattatgacatctgccaaagctgctttttttctggtcgagttgcaaaaggccataaaatgcactatcccatggtggaatattgcactccgactacatcaggagaagatgttcgagactttgccaaggtactaaaaaacaaatttcgaaccaaaaggtattttgcgaagcatccccgaatgggctacctgccagtgcagactgtcttagagggggacaacatggaaacgcctgcctcgtcccctcagctttcacacgatgatactcattcacgcattgaacattatgctagcaggctagcagaaatggaaaacagcaatggatcttatctaaatgatagcatctctcctaatgagagcatagatgatgaacatttgttaatccagcattactgccaaagtttgaaccaggactcccccctgagccagcctcgtagtcctgcccagatcttgatttccttagagagtgaggaaagaggggagctagagagaatcctagcagatcttgaggaagaaaacaggaatctgcaagcagaatatgaccgtctaaagcagcagcacgaacataaaggcctgtccccactgccgtcccctcctgaaatgatgcccacctctccccagagtccccgggatgctgagctcattgctgaggccaagctactgcgtcaacacaaaggccgcctggaagccaggatgcaaatcctggaagaccacaataaacagctggagtcacagttacacaggctaaggcagctgctggagcaaccccaggcagaggccaaagtgaatggcacaacggtgtcctctccttctacctctctacagaggtccgacagcagtcagcctatgctgctccgagtggttggcagtcaaacttcggactccatgggtgaggaagatcttctcagtcctccccaggacacaagcacagggttagaggaggtgatggagcaactcaacaactccttccctagttcaagaggacacaatgtaggaagtcttttccacatggcagatgatttgggcagagcgatggagtccttagtatcagtcatgacagatgaagaaggagcagaataaatgttttacaactcctgattcccgcatggtttttataatattcatacaacaaagaggattagacagtaagagtttacaagaaataaatctatatttttgtgaagggtagtggtattatactgtagatttcagtagtttctaagtctgttattgttttgttaacaatggcaggttttacacgtctatgcaattgtacaaaaaagttataagaaaactacatgtaaaatcttgatagctaaataacttgccatttctttatatggaacgcattttgggttgtttaaaaatttataacagttataaagaaagattgtaaactaaagtgtgctttataaaaaaaagttgtttataaaaacccctaaaaacaaaacaaacacacacacacacacatacacacacacacacaaaactttgaggcagcgcattgttttgcatccttttggcgtgatatccatatgaaattcatggctttttctttttttgcatattaaagataagacttcctctaccaccacaccaaatgactactacacactgctcatttgagaactgtcagctgagtggggcaggcttgagttttcatttcatatatctatatgtctataagtatataaatactatagttatatagataaagagatacgaatttctatagactgactttttccattttttaaatgttcatgtcacatcctaatagaaagaaattacttctagtcagtcatccaggcttacctgcttggtctagaatggatttttcccggagccggaagccaggaggaaactacaccacactaaaacattgtctacagctccagatgtttctcattttaaacaactttccactgacaacgaaagtaaagtaaagtattggatttttttaaagggaacatgtgaatgaatacacaggacttattatatcagagtgagtaatcggttggttggttgattgattgattgattgatacattcagcttcctgctgctagcaatgccacgatttagatttaatgatgcttcagtggaaatcaatcagaaggtattctgaccttgtgaacatcagaaggtattttttaactcccaagcagtagcaggacgatgatagggctggagggctatggattcccagcccatccctgtgaaggagtaggccactctttaagtgaaggattggatgattgttcataatacataaagttctctgtaattacaactaaattattatgccctcttctcacagtcaaaaggaactgggtggtttggtttttgttgcttttttagatttattgtcccatgtgggatgagtttttaaatgccacaagacataatttaaaataaataaactttgggaaaaggtgtaaaacagtagccccatcacatttgtgatactgacaggtatcaacccagaagcccatgaactgtgtttccatcctttgcatttctctgcgagtagttccacacaggtttgtaagtaagtaagaaagaaggcaaattgattcaaatgttacaaaaaaacccttcttggtggattagacaggttaaatatataaacaaacaaacaaaaattgctcaaaaaagaggagaaaagctcaagaggaaaagctaaggactggtaggaaaaagctttactctttcatgccattttatttctttttgatttttaaatcattcattcaatagataccaccgtgtgacctataattttgcaaatctgttacctctgacatcaagtgtaattagcttttggagagtgggctgacatcaagtgtaattagcttttggagagtgggttttgtccattattaataattaattaattaacatcaaacacggcttctcatgctatttctacctcactttggttttggggtgttcctgataattgtgcacacctgagttcacagcttcaccacttgtccattgcgttattttctttttcctttataattctttctttttccttcataattttcaaaagaaaacccaaagctctaaggtaacaaattaccaaattacatgaagatttggtttttgtcttgcatttttttcctttatgtgacgctggaccttttctttacccaaggatttttaaaactcagatttaaaacaaggggttactttacatcctactaagaagtttaagtaagtaagtttcattctaaaatcagaggtaaatagagtgcataaataattttgttttaatctttttgtttttcttttagacacattagctctggagtgagtctgtcataatatttgaacaaaaattgagagctttattgctgcattttaagcataattaatttggacattatttcgtgttgtgttctttataaccaccaagtattaaactgtaaatcataatgtaactgaagcataaacatcacatggcatgttttgtcattgttttcaggtactgagttcttacttgagtatcataatatattgtgttttaacaccaacactgtaacatttacgaattatttttttaaacttcagttttactgcattttcacaacatatcagacttcaccaaatatatgccttactattgtattatagtactgctttactgtgtatctcaataaagcacgcagttatgttac

SEQ ID NO: 35 - protein, 1230 aa, Homo sapiens
MPSSLMLEVPALADFNRAWTELTDWLSLLDQVIKSQRVMVGDLEDINEMIIKQKATMQDLEQRRPQLEELITAAQNLKNKTSNQEARTIITDRIERIQNQWDEVQEHLQNRRQQLNEMLKDSTQWLEAKEEAEQVLGQARAKLESWKEGPYTVDAIQKKITETKQLAKDLRQWQTNVDVANDLALKLLRDYSADDTRKVHMITENINASWRSIHKRVSEREAALEETHRLLQQFPLDLEKFLAWLTEAETTANVLQDATRKERLLEDSKGVKELMKQWQDLQGEIEAHTDVYHNLDENSQKILRSLEGSDDAVLLQRRLDNMNFKWSELRKKSLNIRSHLEASSDQWKRLHLSLQELLVWLQLKDDELSRQAPIGGDFPAVQKQNDVHRAFKRELKTKEPVIMSTLETVRIFLTEQPLEGLEKLYQEPRELPPEERAQNVTRLLRKQAEEVNTEWEKLNLHSADWQRKIDETLERLQELQEATDELDLKLRQAEVIKGSWQPVGDLLIDSLQDHLEKVKALRGEIAPLKENVSHVNDLARQLTTLGIQLSPYNLSTLEDLNTRWKLLQVAVEDRVRQLHEAHRDFGPASQHFLSTSVQGPWERAISPNKVPYYINHETQTTCWDHPKMTELYQSLADLNNVRFSAYRTAMKLRRLQKALCLDLLSLSAACDALDQHNLKQNDQPMDILQIINCLTTIYDRLEQEHNNLVNVPLCVDMCLNWLLNVYDTGRTGRIRVLSFKTGIISLCKAHLEDKYRYLFKQVASSTGFCDQRRLGLLLHDSIQIPRQLGEVASFGGSNIEPSVRSCFQFANNKPEIEAALFLDWMRLEPQSMVWLPVLHRVAAAETAKHQAKCNICKECPIIGFRYRSLKHFNYDICQSCFFSGRVAKGHKMHYPMVEYCTPTTSGEDVRDFAKVLKNKFRTKRYFAKHPRMGYLPVQTVLEGDNMETPASSPQLSHDDTHSRIEHYASRLAEMENSNGSYLNDSISPNESIDDEHLLIQHYCQSLNQDSPLSQPRSPAQILISLESEERGELERILADLEEENRNLQAEYDRLKQQHEHKGLSPLPSPPEMMPTSPQSPRDAELIAEAKLLRQHKGRLEARMQILEDHNKQLESQLHRLRQLLEQPQAEAKVNGTTVSSPSTSLQRSDSSQPMLLRVVGSQTSDSMGEEDLLSPPQDTSTGLEEVMEQLNNSFPSSRGHNVGSLFHMADDLGRAMESLVSVMTDEEGAE

SEQ ID NO: 36 - DNA, 7048 bp, Homo sapiens
acactagcaatggcaaagctttgtgcggaggcattgctggctgctctgaactaaaagcatccgtggggaccgaaagaggtttttgcacaccttattaaggaactccaggatggcattgggcagcggcaaactgttgtcagaacattgaatgcaactggggaagaaataattcagcaatcctcaaaaacagatgccagtattctacaggaaaaattgggaagcctgaatctgcggtggcaggaggtctgcaaacagctgtcagacagaaaaaagaggctagaagaacaaaagaatatcttgtcagaatttcaaagagatttaaatgaatttgttttatggttggaggaagcagataacattgctagtatcccacttgaacctggaaaagagcagcaactaaaagaaaagcttgagcaagtcaagttactggtggaagagttgcccctgcgccagggaattctcaaacaattaaatgaaactggaggacccgtgcttgtaagtgctcccataagcccagaagagcaagataaacttgaaaataagctcaagcagacaaatctccagtggataaaggtttccagagctttacctgagaaacaaggagaaattgaagctcaaataaaagaccttgggcagcttgaaaaaaagcttgaagaccttgaagagcagttaaatcatctgctgctgtggttatctcctattaggaatcagttggaaatttataaccaaccaaaccaagaaggaccatttgacgttcaggaaactgaaatagcagttcaagctaaacaaccggatgtggaagagattttgtctaaagggcagcatttgtacaaggaaaaaccagccactcagccagtgaagaggaagttagaagatctgagctctgagtggaaggcggtaaaccgtttacttcaagagctgagggcaaagcagcctgacctagctcctggactgaccactattggagcctctcctactcagactgttactctggtgacacaacctgtggttactaaggaaactgccatctccaaactagaaatgccatcttccttgatgttggaggtacctgctctggcagatttcaaccgggcttggacagaacttaccgactggctttctctgcttgatcaagttataaaatcacagagggtgatggtgggtgaccttgaggatatcaacgagatgatcatcaagcagaaggcaacaatgcaggatttggaacagaggcgtccccagttggaagaactcattaccgctgcccaaaatttgaaaaacaagaccagcaatcaagaggctagaacaatcattacggatcgaattgaaagaattcagaatcagtgggatgaagtacaagaacaccttcagaaccggaggcaacagttgaatgaaatgttaaaggattcaacacaatggctggaagctaaggaagaagctgagcaggtcttaggacaggccagagccaagcttgagtcatggaaggagggtccctatacagtagatgcaatccaaaagaaaatcacagaaaccaagcagttggccaaagacctccgccagtggcagacaaatgtagatgtggcaaatgacttggccctgaaacttctccgggattattctgcagatgataccagaaaagtccacatgataacagagaatatcaatgcctcttggagaagcattcataaaagggtgagtgagcgagaggctgctttggaagaaactcatagattactgcaacagttccccctggacctggaaaagtttcttgcctggcttacagaagctgaaacaactgccaatgtcctacaggatgctacccgtaaggaaaggctcctagaagactccaagggagtaaaagagctgatgaaacaatggcaagacctccaaggtgaaattgaagctcacacagatgtttatcacaacctggatgaaaacagccaaaaaatcctgagatccctggaaggttccgatgatgcagtcctgttacaaagacgtttggataacatgaacttcaagtggagtgaacttcggaaaaagtctctcaacattaggtcccatttggaagccagttctgaccagtggaagcgtctgcacctttctctgcaggaacttctggtgtggctacagctgaaagatgatgaattaagccggcaggcacctattggaggcgactttccagcagttcagaagcagaacgatgtacatagggccttcaagagggaattgaaaactaaagaacctgtaatcatgagtactcttgagactgtacgaatatttctgacagagcagcctttggaaggactagagaaactctaccaggagcccagagagctgcctcctgaggagagagcccagaatgtcactcggcttctacgaaagcaggctgaggaggtcaatactgagtgggaaaaattgaacctgcactccgctgactggcagagaaaaatagatgagacccttgaaagactccaggaacttcaagaggccacggatgagctggacctcaagctgcgccaagctgaggtgatcaagggatcctggcagcccgtgggcgatctcctcattgactctctccaagatcacctcgagaaagtcaaggcacttcgaggagaaattgcgcctctgaaagagaacgtgagccacgtcaatgaccttgctcgccagcttaccactttgggcattcagctctcaccgtataacctcagcactctggaagacctgaacaccagatggaagcttctgcaggtggccgtcgaggaccgagtcaggcagctgcatgaagcccacagggactttggtccagcatctcagcactttctttccacgtctgtccagggtccctgggagagagccatctcgccaaacaaagtgccctactatatcaaccacgagactcaaacaacttgctgggaccatcccaaaatgacagagctctaccagtctttagctgacctgaataatgtcagattctcagcttataggactgccatgaaactccgaagactgcagaaggccctttgcttggatctcttgagcctgtcagctgcatgtgatgccttggaccagcacaacctcaagcaaaatgaccagcccatggatatcctgcagattattaattgtttgaccactatttatgaccgcctggagcaagagcacaacaatttggtcaacgtccctctctgcgtggatatgtgtctgaactggctgctgaatgtttatgatacgggacgaacagggaggatccgtgtcctgtcttttaaaactggcatcatttccctgtgtaaagcacatttggaagacaagtacagataccttttcaagcaagtggcaagttcaacaggattttgtgaccagcgcaggctgggcctccttctgcatgattctatccaaattccaagacagttgggtgaagttgcatcctttgggggcagtaacattgagccaagtgtccggagctgcttccaatttgctaataataagccagagatcgaagcggccctcttcctagactggatgagactggaaccccagtccatggtgtggctgcccgtcctgcacagagtggctgctgcagaaactgccaagcatcaggccaaatgtaacatctgcaaagagtgtccaatcattggattcaggtacaggagtctaaagcactttaattatgacatctgccaaagctgctttttttctggtcgagttgcaaaaggccataaaatgcactatcccatggtggaatattgcactccgactacatcaggagaagatgttcgagactttgccaaggtactaaaaaacaaatttcgaaccaaaaggtattttgcgaagcatccccgaatgggctacctgccagtgcagactgtcttagagggggacaacatggaaacgaatctgcaagcagaatatgaccgtctaaagcagcagcacgaacataaaggcctgtccccactgccgtcccctcctgaaatgatgcccacctctccccagagtccccgggatgctgagctcattgctgaggccaagctactgcgtcaacacaaaggccgcctggaagccaggatgcaaatcctggaagaccacaataaacagctggagtcacagttacacaggctaaggcagctgctggagcaaccccaggcagaggccaaagtgaatggcacaacggtgtcctctccttctacctctctacagaggtccgacagcagtcagcctatgctgctccgagtggttggcagtcaaacttcggactccatgggtgaggaagatcttctcagtcctccccaggacacaagcacagggttagaggaggtgatggagcaactcaacaactccttccctagttcaagaggacacaatgtaggaagtcttttccacatggcagatgatttgggcagagcgatggagtccttagtatcagtcatgacagatgaagaaggagcagaataaatgttttacaactcctgattcccgcatggtttttataatattcatacaacaaagaggattagacagtaagagtttacaagaaataaatctatatttttgtgaagggtagtggtattatactgtagatttcagtagtttctaagtctgttattgttttgttaacaatggcaggttttacacgtctatgcaattgtacaaaaaagttataagaaaactacatgtaaaatcttgatagctaaataacttgccatttctttatatggaacgcattttgggttgtttaaaaatttataacagttataaagaaagattgtaaactaaagtgtgctttataaaaaaaagttgtttataaaaacccctaaaaacaaaacaaacacacacacacacacatacacacacacacacaaaactttgaggcagcgcattgttttgcatccttttggcgtgatatccatatgaaattcatggctttttctttttttgcatattaaagataagacttcctctaccaccacaccaaatgactactacacactgctcatttgagaactgtcagctgagtggggcaggcttgagttttcatttcatatatctatatgtctataagtatataaatactatagttatatagataaagagatacgaatttctatagactgactttttccattttttaaatgttcatgtcacatcctaatagaaagaaattacttctagtcagtcatccaggcttacctgcttggtctagaatggatttttcccggagccggaagccaggaggaaactacaccacactaaaacattgtctacagctccagatgtttctcattttaaacaactttccactgacaacgaaagtaaagtaaagtattggatttttttaaagggaacatgtgaatgaatacacaggacttattatatcagagtgagtaatcggttggttggttgattgattgattgattgatacattcagcttcctgctgctagcaatgccacgatttagatttaatgatgcttcagtggaaatcaatcagaaggtattctgaccttgtgaacatcagaaggtattttttaactcccaagcagtagcaggacgatgatagggctggagggctatggattcccagcccatccctgtgaaggagtaggccactctttaagtgaaggattggatgattgttcataatacataaagttctctgtaattacaactaaattattatgccctcttctcacagtcaaaaggaactgggtggtttggtttttgttgcttttttagatttattgtcccatgtgggatgagtttttaaatgccacaagacataatttaaaataaataaactttgggaaaaggtgtaaaacagtagccccatcacatttgtgatactgacaggtatcaacccagaagcccatgaactgtgtttccatcctttgcatttctctgcgagtagttccacacaggtttgtaagtaagtaagaaagaaggcaaattgattcaaatgttacaaaaaaacccttcttggtggattagacaggttaaatatataaacaaacaaacaaaaattgctcaaaaaagaggagaaaagctcaagaggaaaagctaaggactggtaggaaaaagctttactctttcatgccattttatttctttttgatttttaaatcattcattcaatagataccaccgtgtgacctataattttgcaaatctgttacctctgacatcaagtgtaattagcttttggagagtgggctgacatcaagtgtaattagcttttggagagtgggttttgtccattattaataattaattaattaacatcaaacacggcttctcatgctatttctacctcactttggttttggggtgttcctgataattgtgcacacctgagttcacagcttcaccacttgtccattgcgttattttctttttcctttataattctttctttttccttcataattttcaaaagaaaacccaaagctctaaggtaacaaattaccaaattacatgaagatttggtttttgtcttgcatttttttcctttatgtgacgctggaccttttctttacccaaggatttttaaaactcagatttaaaacaaggggttactttacatcctactaagaagtttaagtaagtaagtttcattctaaaatcagaggtaaatagagtgcataaataattttgttttaatctttttgtttttcttttagacacattagctctggagtgagtctgtcataatatttgaacaaaaattgagagctttattgctgcattttaagcataattaatttggacattatttcgtgttgtgttctttataaccaccaagtattaaactgtaaatcataatgtaactgaagcataaacatcacatggcatgttttgtcattgttttcaggtactgagttcttacttgagtatcataatatattgtgttttaacaccaacactgtaacatttacgaattatttttttaaacttcagttttactgcattttcacaacatatcagacttcaccaaatatatgccttactattgtattatagtactgctttactgtgtatctcaataaagcacgcagttatgttac

SEQ ID NO: 37 - protein, 1133 aa, Homo sapiens
MPSSLMLEVPALADFNRAWTELTDWLSLLDQVIKSQRVMVGDLEDINEMIIKQKATMQDLEQRRPQLEELITAAQNLKNKTSNQEARTIITDRIERIQNQWDEVQEHLQNRRQQLNEMLKDSTQWLEAKEEAEQVLGQARAKLESWKEGPYTVDAIQKKITETKQLAKDLRQWQTNVDVANDLALKLLRDYSADDTRKVHMITENINASWRSIHKRVSEREAALEETHRLLQQFPLDLEKFLAWLTEAETTANVLQDATRKERLLEDSKGVKELMKQWQDLQGEIEAHTDVYHNLDENSQKILRSLEGSDDAVLLQRRLDNMNFKWSELRKKSLNIRSHLEASSDQWKRLHLSLQELLVWLQLKDDELSRQAPIGGDFPAVQKQNDVHRAFKRELKTKEPVIMSTLETVRIFLTEQPLEGLEKLYQEPRELPPEERAQNVTRLLRKQAEEVNTEWEKLNLHSADWQRKIDETLERLQELQEATDELDLKLRQAEVIKGSWQPVGDLLIDSLQDHLEKVKALRGEIAPLKENVSHVNDLARQLTTLGIQLSPYNLSTLEDLNTRWKLLQVAVEDRVRQLHEAHRDFGPASQHFLSTSVQGPWERAISPNKVPYYINHETQTTCWDHPKMTELYQSLADLNNVRFSAYRTAMKLRRLQKALCLDLLSLSAACDALDQHNLKQNDQPMDILQIINCLTTIYDRLEQEHNNLVNVPLCVDMCLNWLLNVYDTGRTGRIRVLSFKTGIISLCKAHLEDKYRYLFKQVASSTGFCDQRRLGLLLHDSIQIPRQLGEVASFGGSNIEPSVRSCFQFANNKPEIEAALFLDWMRLEPQSMVWLPVLHRVAAAETAKHQAKCNICKECPIIGFRYRSLKHFNYDICQSCFFSGRVAKGHKMHYPMVEYCTPTTSGEDVRDFAKVLKNKFRTKRYFAKHPRMGYLPVQTVLEGDNMETNLQAEYDRLKQQHEHKGLSPLPSPPEMMPTSPQSPRDAELIAEAKLLRQHKGRLEARMQILEDHNKQLESQLHRLRQLLEQPQAEAKVNGTTVSSPSTSLQRSDSSQPMLLRVVGSQTSDSMGEEDLLSPPQDTSTGLEEVMEQLNNSFPSSRGHNVGSLFHMADDLGRAMESLVSVMTDEEGAE

SEQ ID NO: 38 - DNA, 13897 bp, Homo sapiens
acctaacctaacttgaatcatgcgaaaggggagctgttggaattcaaatagactttctggttcccagcagtcggcagtaatagaatgctttcaggaagatgacagaatcaggagaaagatgctgttttgcactatcttgatttgttacagcagccaacttattggcatgatggagtgacaggaaaaacagctggcatggaagatgaaagagaagatgttcaaaagaaaacattcacaaaatgggtaaatgcacaattttctaagtttgggaagcagcatattgagaacctcttcagtgacctacaggatgggaggcgcctcctagacctcctcgaaggcctgacagggcaaaaactgccaaaagaaaaaggatccacaagagttcatgccctgaacaatgtcaacaaggcactgcgggttttgcagaacaataatgttgatttagtgaatattggaagtactgacatcgtagatggaaatcataaactgactcttggtttgatttggaatataatcctccactggcaggtcaaaaatgtaatgaaaaatatcatggctggattgcaacaaaccaacagtgaaaagattctcctgagctgggtccgacaatcaactcgtaattatccacaggttaatgtaatcaacttcaccaccagctggtctgatggcctggctttgaatgctctcatccatagtcataggccagacctatttgactggaatagtgtggtttgccagcagtcagccacacaacgactggaacatgcattcaacatcgccagatatcaattaggcatagagaaactactcgatcctgaagatgttgataccacctatccagataagaagtccatcttaatgtacatcacatcactcttccaagttttgcctcaacaagtgagcattgaagccatccaggaagtggaaatgttgccaaggccacctaaagtgactaaagaagaacattttcagttacatcatcaaatgcactattctcaacagatcacggtcagtctagcacagggatatgagagaacttcttcccctaagcctcgattcaagagctatgcctacacacaggctgcttatgtcaccacctctgaccctacacggagcccatttccttcacagcatttggaagctcctgaagacaagtcatttggcagttcattgatggagagtgaagtaaacctggaccgttatcaaacagctttagaagaagtattatcgtggcttctttctgctgaggacacattgcaagcacaaggagagatttctaatgatgtggaagtggtgaaagaccagtttcatactcatgaggggtacatgatggatttgacagcccatcagggccgggttggtaatattctacaattgggaagtaagctgattggaacaggaaaattatcagaagatgaagaaactgaagtacaagagcagatgaatctcctaaattcaagatgggaatgcctcagggtagctagcatggaaaaacaaagcaatttacatagagttttaatggatctccagaatcagaaactgaaagagttgaatgactggctaacaaaaacagaagaaagaacaaggaaaatggaggaagagcctcttggacctgatcttgaagacctaaaacgccaagtacaacaacataaggtgcttcaagaagatctagaacaagaacaagtcagggtcaattctctcactcacatggtggtggtagttgatgaatctagtggagatcacgcaactgctgctttggaagaacaacttaaggtattgggagatcgatgggcaaacatctgtagatggacagaagaccgctgggttcttttacaagacatccttctcaaatggcaacgtcttactgaagaacagtgcctttttagtgcatggctttcagaaaaagaagatgcagtgaacaagattcacacaactggctttaaagatcaaaatgaaatgttatcaagtcttcaaaaactggccgttttaaaagcggatctagaaaagaaaaagcaatccatgggcaaactgtattcactcaaacaagatcttctttcaacactgaagaataagtcagtgacccagaagacggaagcatggctggataactttgcccggtgttgggataatttagtccaaaaacttgaaaagagtacagcacagatttcacaggctgtcaccaccactcagccatcactaacacagacaactgtaatggaaacagtaactacggtgaccacaagggaacagatcctggtaaagcatgctcaagaggaacttccaccaccacctccccaaaagaagaggcagattactgtggattctgaaattaggaaaaggttggatgttgatataactgaacttcacagctggattactcgctcagaagctgtgttgcagagtcctgaatttgcaatctttcggaaggaaggcaacttctcagacttaaaagaaaaagtcaatgccatagagcgagaaaaagctgagaagttcagaaaactgcaagatgccagcagatcagctcaggccctggtggaacagatggtgaatgagggtgttaatgcagatagcatcaaacaagcctcagaacaactgaacagccggtggatcgaattctgccagttgctaagtgagagacttaactggctggagtatcagaacaacatcatcgctttctataatcagctacaacaattggagcagatgacaactactgctgaaaactggttgaaaatccaacccaccaccccatcagagccaacagcaattaaaagtcagttaaaaatttgtaaggatgaagtcaaccggctatcagatcttcaacctcaaattgaacgattaaaaattcaaagcatagccctgaaagagaaaggacaaggacccatgttcctggatgcagactttgtggcctttacaaatcattttaagcaagtcttttctgatgtgcaggccagagagaaagagctacagacaatttttgacactttgccaccaatgcgctatcaggagaccatgagtgccatcaggacatgggtccagcagtcagaaaccaaactctccatacctcaacttagtgtcaccgactatgaaatcatggagcagagactcggggaattgcaggctttacaaagttctctgcaagagcaacaaagtggcctatactatctcagcaccactgtgaaagagatgtcgaagaaagcgccctctgaaattagccggaaatatcaatcagaatttgaagaaattgagggacgctggaagaagctctcctcccagctggttgagcattgtcaaaagctagaggagcaaatgaataaactccgaaaaattcagaatcacatacaaaccctgaagaaatggatggctgaagttgatgtttttctgaaggaggaatggcctgcccttggggattcagaaattctaaaaaagcagctgaaacagtgcagacttttagtcagtgatattcagacaattcagcccagtctaaacagtgtcaatgaaggtgggcagaagataaagaatgaagcagagccagagtttgcttcgagacttgagacagaactcaaagaacttaacactcagtgggatcacatgtgccaacaggtctatgccagaaaggaggccttgaagggaggtttggagaaaactgtaagcctccagaaagatctatcagagatgcacgaatggatgacacaagctgaagaagagtatcttgagagagattttgaatataaaactccagatgaattacagaaagcagttgaagagatgaagagagctaaagaagaggcccaacaaaaagaagcgaaagtgaaactccttactgagtctgtaaatagtgtcatagctcaagctccacctgtagcacaagaggccttaaaaaaggaacttgaaactctaaccaccaactaccagtggctctgcactaggctgaatgggaaatgcaagactttggaagaagtttgggcatgttggcatgagttattgtcatacttggagaaagcaaacaagtggctaaatgaagtagaatttaaacttaaaaccactgaaaacattcctggcggagctgaggaaatctctgaggtgctagattcacttgaaaatttgatgcgacattcagaggataacccaaatcagattcgcatattggcacagaccctaacagatggcggagtcatggatgagctaatcaatgaggaacttgagacatttaattctcgttggagggaactacatgaagaggctgtaaggaggcaaaagttgcttgaacagagcatccagtctgcccaggagactgaaaaatccttacacttaatccaggagtccctcacattcattgacaagcagttggcagcttatattgcagacaaggtggacgcagctcaaatgcctcaggaagcccagaaaatccaatctgatttgacaagtcatgagatcagtttagaagaaatgaagaaacataatcaggggaaggaggctgcccaaagagtcctgtctcagattgatgttgcacagaaaaaattacaagatgtctccatgaagtttcgattattccagaaaccagccaattttgagcagcgtctacaagaaagtaagatgattttagatgaagtgaagatgcacttgcctgcattggaaacaaagagtgtggaacaggaagtagtacagtcacagctaaatcattgtgtgaacttgtataaaagtctgagtgaagtgaagtctgaagtggaaatggtgataaagactggacgtcagattgtacagaaaaagcagacggaaaatcccaaagaacttgatgaaagagtaacagctttgaaattgcattataatgagctgggagcaaaggtaacagaaagaaagcaacagttggagaaatgcttgaaattgtcccgtaagatgcgaaaggaaatgaatgtcttgacagaatggctggcagctacagatatggaattgacaaagagatcagcagttgaaggaatgcctagtaatttggattctgaagttgcctggggaaaggctactcaaaaagagattgagaaacagaaggtgcacctgaagagtatcacagaggtaggagaggccttgaaaacagttttgggcaagaaggagacgttggtggaagataaactcagtcttctgaatagtaactggatagctgtcacctcccgagcagaagagtggttaaatcttttgttggaataccagaaacacatggaaacttttgaccagaatgtggaccacatcacaaagtggatcattcaggctgacacacttttggatgaatcagagaaaaagaaaccccagcaaaaagaagacgtgcttaagcgtttaaaggcagaactgaatgacatacgcccaaaggtggactctacacgtgaccaagcagcaaacttgatggcaaaccgcggtgaccactgcaggaaattagtagagccccaaatctcagagctcaaccatcgatttgcagccatttcacacagaattaagactggaaaggcctccattcctttgaaggaattggagcagtttaactcagatatacaaaaattgcttgaaccactggaggctgaaattcagcagggggtgaatctgaaagaggaagacttcaataaagatatgaatgaagacaatgagggtactgtaaaagaattgttgcaaagaggagacaacttacaacaaagaatcacagatgagagaaagcgagaggaaataaagataaaacagcagctgttacagacaaaacataatgctctcaaggatttgaggtctcaaagaagaaaaaaggctctagaaatttctcatcagtggtatcagtacaagaggcaggctgatgatctcctgaaatgcttggatgacattgaaaaaaaattagccagcctacctgagcccagagatgaaaggaaaataaaggaaattgatcgggaattgcagaagaagaaagaggagctgaatgcagtgcgtaggcaagctgagggcttgtctgaggatggggccgcaatggcagtggagccaactcagatccagctcagcaagcgctggcgggaaattgagagcaaatttgctcagtttcgaagactcaactttgcacaaattcacactgtccgtgaagaaacgatgatggtgatgactgaagacatgcctttggaaatttcttatgtgccttctacttatttgactgaaatcactcatgtctcacaagccctattagaagtggaacaacttctcaatgctcctgacctctgtgctaaggactttgaagatctctttaagcaagaggagtctctgaagaatataaaagatagtctacaacaaagctcaggtcggattgacattattcatagcaagaagacagcagcattgcaaagtgcaacgcctgtggaaagggtgaagctacaggaagctctctcccagcttgatttccaatgggaaaaagttaacaaaatgtacaaggaccgacaagggcgatttgacagatctgttgagaaatggcggcgttttcattatgatataaagatatttaatcagtggctaacagaagctgaacagtttctcagaaagacacaaattcctgagaattgggaacatgctaaatacaaatggtatcttaaggaactccaggatggcattgggcagcggcaaactgttgtcagaacattgaatgcaactggggaagaaataattcagcaatcctcaaaaacagatgccagtattctacaggaaaaattgggaagcctgaatctgcggtggcaggaggtctgcaaacagctgtcagacagaaaaaagaggctagaagaacaaaagaatatcttgtcagaatttcaaagagatttaaatgaatttgttttatggttggaggaagcagataacattgctagtatcccacttgaacctggaaaagagcagcaactaaaagaaaagcttgagcaagtcaagttactggtggaagagttgcccctgcgccagggaattctcaaacaattaaatgaaactggaggacccgtgcttgtaagtgctcccataagcccagaagagcaagataaacttgaaaataagctcaagcagacaaatctccagtggataaaggtttccagagctttacctgagaaacaaggagaaattgaagctcaaataaaagaccttgggcagcttgaaaaaaagcttgaagaccttgaagagcagttaaatcatctgctgctgtggttatctcctattaggaatcagttggaaatttataaccaaccaaaccaagaaggaccatttgacgttaaggaaactgaaatagcagttcaagctaaacaaccggatgtggaagagattttgtctaaagggcagcatttgtacaaggaaaaaccagccactcagccagtgaagaggaagttagaagatctgagctctgagtggaaggcggtaaaccgtttacttcaagagctgagggcaaagcagcctgacctagctcctggactgaccactattggagcctctcctactcagactgttactctggtgacacaacctgtggttactaaggaaactgccatctccaaactagaaatgccatcttccttgatgttggaggtacctgctctggcagatttcaaccgggcttggacagaacttaccgactggctttctctgcttgatcaagttataaaatcacagagggtgatggtgggtgaccttgaggatatcaacgagatgatcatcaagcagaaggcaacaatgcaggatttggaacagaggcgtccccagttggaagaactcattaccgctgcccaaaatttgaaaaacaagaccagcaatcaagaggctagaacaatcattacggatcgaattgaaagaattcagaatcagtgggatgaagtacaagaacaccttcagaaccggaggcaacagttgaatgaaatgttaaaggattcaacacaatggctggaagctaaggaagaagctgagcaggtcttaggacaggccagagccaagcttgagtcatggaaggagggtccctatacagtagatgcaatccaaaagaaaatcacagaaaccaagcagttggccaaagacctccgccagtggcagacaaatgtagatgtggcaaatgacttggccctgaaacttctccgggattattctgcagatgataccagaaaagtccacatgataacagagaatatcaatgcctcttggagaagcattcataaaagggtgagtgagcgagaggctgctttggaagaaactcatagattactgcaacagttccccctggacctggaaaagtttcttgcctggcttacagaagctgaaacaactgccaatgtcctacaggatgctacccgtaaggaaaggctcctagaagactccaagggagtaaaagagctgatgaaacaatggcaagacctccaaggtgaaattgaagctcacacagatgtttatcacaacctggatgaaaacagccaaaaaatcctgagatccctggaaggttccgatgatgcagtcctgttacaaagacgtttggataacatgaacttcaagtggagtgaacttcggaaaaagtctctcaacattaggtcccatttggaagccagttctgaccagtggaagcgtctgcacctttctctgcaggaacttctggtgtggctacagctgaaagatgatgaattaagccggcaggcacctattggaggcgactttccagcagttcagaagcagaacgatgtacatagggccttcaagagggaattgaaaactaaagaacctgtaatcatgagtactcttgagactgtacgaatatttctgacagagcagcctttggaaggactagagaaactctaccaggagcccagagagctgcctcctgaggagagagcccagaatgtcactcggcttctacgaaagcaggctgaggaggtcaatactgagtgggaaaaattgaacctgcactccgctgactggcagagaaaaatagatgagacccttgaaagactccgggaacttcaagaggccacggatgagctggacctcaagctgcgccaagctgaggtgatcaagggatcctggcagcccgtgggcgatctcctcattgactctctccaagatcacctcgagaaagtcaaggcacttcgaggagaaattgcgcctctgaaagagaacgtgagccacgtcaatgaccttgctcgccagcttaccactttgggcattcagctctcaccgtataacctcagcactctggaagacctgaacaccagatggaagcttctgcaggtggccgtcgaggaccgagtcaggcagctgcatgaagcccacagggactttggtccagcatctcagcactttctttccacgtctgtccagggtccctgggagagagccatctcgccaaacaaagtgccctactatatcaaccacgagactcaaacaacttgctgggaccatcccaaaatgacagagctctaccagtctttagctgacctgaataatgtcagattctcagcttataggactgccatgaaactccgaagactgcagaaggccctttgcttggatctcttgagcctgtcagctgcatgtgatgccttggaccagcacaacctcaagcaaaatgaccagcccatggatatcctgcagattattaattgtttgaccactatttatgaccgcctggagcaagagcacaacaatttggtcaacgtccctctctgcgtggatatgtgtctgaactggctgctgaatgtttatgatacgggacgaacagggaggatccgtgtcctgtcttttaaaactggcatcatttccctgtgtaaagcacatttggaagacaagtacagataccttttcaagcaagtggcaagttcaacaggattttgtgaccagcgcaggctgggcctccttctgcatgattctatccaaattccaagacagttgggtgaagttgcatcctttgggggcagtaacattgagccaagtgtccggagctgcttccaatttgctaataataagccagagatcgaagcggccctcttcctagactggatgagactggaaccccagtccatggtgtggctgcccgtcctgcacagagtggctgctgcagaaactgccaagcatcaggccaaatgtaacatctgcaaagagtgtccaatcattggattcaggtacaggagtctaaagcactttaattatgacatctgccaaagctgctttttttctggtcgagttgcaaaaggccataaaatgcactatcccatggtggaatattgcactccgactacatcaggagaagatgttcgagactttgccaaggtactaaaaaacaaatttcgaaccaaaaggtattttgcgaagcatccccgaatgggctacctgccagtgcagactgtcttagagggggacaacatggaaactcccgttactctgatcaacttctggccagtagattctgcgcctgcctcgtcccctcagctttcacacgatgatactcattcacgcattgaacattatgctagcaggctagcagaaatggaaaacagcaatggatcttatctaaatgatagcatctctcctaatgagagcatagatgatgaacatttgttaatccagcattactgccaaagtttgaaccaggactcccccctgagccagcctcgtagtcctgcccagatcttgatttccttagagagtgaggaaagaggggagctagagagaatcctagcagatcttgaggaagaaaacaggaatctgcaagcagaatatgaccgtctaaagcagcagcacgaacataaaggcctgtccccactgccgtcccctcctgaaatgatgcccacctctccccagagtccccgggatgctgagctcattgctgaggccaagctactgcgtcaacacaaaggccgcctggaagccaggatgcaaatcctggaagaccacaataaacagctggagtcacagttacacaggctaaggcagctgctggagcaaccccaggcagaggccaaagtgaatggcacaacggtgtcctctccttctacctctctacagaggtccgacagcagtcagcctatgctgctccgagtggttggcagtcaaacttcggactccatgggtgaggaagatcttctcagtcctccccaggacacaagcacagggttagaggaggtgatggagcaactcaacaactccttccctagttcaagaggacacaatgtaggaagtcttttccacatggcagatgatttgggcagagcgatggagtccttagtatcagtcatgacagatgaagaaggagcagaataaatgttttacaactcctgattcccgcatggtttttataatattcatacaacaaagaggattagacagtaagagtttacaagaaataaatctatatttttgtgaagggtagtggtattatactgtagatttcagtagtttctaagtctgttattgttttgttaacaatggcaggttttacacgtctatgcaattgtacaaaaaagttataagaaaactacatgtaaaatcttgatagctaaataacttgccatttctttatatggaacgcattttgggttgtttaaaaatttataacagttataaagaaagattgtaaactaaagtgtgctttataaaaaaaagttgtttataaaaacccctaaaaacaaaacaaacacacacacacacacatacacacacacacacaaaactttgaggcagcgcattgttttgcatccttttggcgtgatatccatatgaaattcatggctttttctttttttgcatattaaagataagacttcctctaccaccacaccaaatgactactacacactgctcatttgagaactgtcagctgagtggggcaggcttgagttttcatttcatatatctatatgtctataagtatataaatactatagttatatagataaagagatacgaatttctatagactgactttttccattttttaaatgttcatgtcacatcctaatagaaagaaattacttctagtcagtcatccaggcttacctgcttggtctagaatggatttttcccggagccggaagccaggaggaaactacaccacactaaaacattgtctacagctccagatgtttctcattttaaacaactttccactgacaacgaaagtaaagtaaagtattggatttttttaaagggaacatgtgaatgaatacacaggacttattatatcagagtgagtaatcggttggttggttgattgattgattgattgatacattcagcttcctgctgctagcaatgccacgatttagatttaatgatgcttcagtggaaatcaatcagaaggtattctgaccttgtgaacatcagaaggtattttttaactcccaagcagtagcaggacgatgatagggctggagggctatggattcccagcccatccctgtgaaggagtaggccactctttaagtgaaggattggatgattgttcataatacataaagttctctgtaattacaactaaattattatgccctcttctcacagtcaaaaggaactgggtggtttggtttttgttgcttttttagatttattgtcccatgtgggatgagtttttaaatgccacaagacataatttaaaataaataaactttgggaaaaggtgtaaaacagtagccccatcacatttgtgatactgacaggtatcaacccagaagcccatgaactgtgtttccatcctttgcatttctctgcgagtagttccacacaggtttgtaagtaagtaagaaagaaggcaaattgattcaaatgttacaaaaaaacccttcttggtggattagacaggttaaatatataaacaaacaaacaaaaattgctcaaaaaagaggagaaaagctcaagaggaaaagctaaggactggtaggaaaaagctttactctttcatgccattttatttctttttgatttttaaatcattcattcaatagataccaccgtgtgacctataattttgcaaatctgttacctctgacatcaagtgtaattagcttttggagagtgggctgacatcaagtgtaattagcttttggagagtgggttttgtccattattaataattaattaattaacatcaaacacggcttctcatgctatttctacctcactttggttttggggtgttcctgataattgtgcacacctgagttcacagcttcaccacttgtccattgcgttattttctttttcctttataattctttctttttccttcataattttcaaaagaaaacccaaagctctaaggtaacaaattaccaaattacatgaagatttggtttttgtcttgcatttttttcctttatgtgacgctggaccttttctttacccaaggatttttaaaactcagatttaaaacaaggggttactttacatcctactaagaagtttaagtaagtaagtttcattctaaaatcagaggtaaatagagtgcataaataattttgttttaatctttttgtttttcttttagacacattagctctggagtgagtctgtcataatatttgaacaaaaattgagagctttattgctgcattttaagcataattaatttggacattatttcgtgttgtgttctttataaccaccaagtattaaactgtaaatcataatgtaactgaagcataaacatcacatggcatgttttgtcattgttttcaggtactgagttcttacttgagtatcataatatattgtgttttaacaccaacactgtaacatttacgaattatttttttaaacttcagttttactgcattttcacaacatatcagacttcaccaaatatatgccttactattgtattatagtactgctttactgtgtatctcaataaagcacgcagttatgttacaaaaaagta

SEQ ID NO: 39 - protein, 3695 aa, Homo sapiens
MEDEREDVQKKTFTKWVNAQFSKFGKQHIENLFSDLQDGRRLLDLLEGLTGQKLPKEKGSTRVHALNNVNKALRVLQNNNVDLVNIGSTDIVDGNHKLTLGLIWNIILHWQVKNVMKNIMAGLQQTNSEKILLSWVRQSTRNYPQVNVINFTTSWSDGLALNALIHSHRPDLFDWNSVVCQQSATQRLEHAFNIARYQLGIEKLLDPEDVDTTYPDKKSILMYITSLFQVLPQQVSIEAIQEVEMLPRPPKVTKEEHFQLHHQMHYSQQITVSLAQGYERTSSPKPRFKSYAYTQAAYVTTSDPTRSPFPSQHLEAPEDKSFGSSLMESEVNLDRYQTALEEVLSWLLSAEDTLQAQGEISNDVEVVKDQFHTHEGYMMDLTAHQGRVGNILQLGSKLIGTGKLSEDEETEVQEQMNLLNSRWECLRVASMEKQSNLHRVLMDLQNQKLKELNDWLTKTEERTRKMEEEPLGPDLEDLKRQVQQHKVLQEDLEQEQVRVNSLTHMVVVVDESSGDHATAALEEQLKVLGDRWANICRWTEDRWVLLQDILLKWQRLTEEQCLFSAWLSEKEDAVNKIHTTGFKDQNEMLSSLQKLAVLKADLEKKKQSMGKLYSLKQDLLSTLKNKSVTQKTEAWLDNFARCWDNLVQKLEKSTAQISQAVTTTQPSLTQTTVMETVTTVTTREQILVKHAQEELPPPPPQKKRQITVDSEIRKRLDVDITELHSWITRSEAVLQSPEFAIFRKEGNFSDLKEKVNAIEREKAEKFRKLQDASRSAQALVEQMVNEGVNADSIKQASEQLNSRWIEFCQLLSERLNWLEYQNNIIAFYNQLQQLEQMTTTAENWLKIQPTTPSEPTAIKSQLKICKDEVNRLSDLQPQIERLKIQSIALKEKGQGPMFLDADFVAFTNHFKQVFSDVQAREKELQTIFDTLPPMRYQETMSAIRTWVQQSETKLSIPQLSVTDYEIMEQRLGELQALQSSLQEQQSGLYYLSTTVKEMSKKAPSEISRKYQSEFEEIEGRWKKLSSQLVEHCQKLEEQMNKLRKIQNHIQTLKKWMAEVDVFLKEEWPALGDSEILKKQLKQCRLLVSDIQTIQPSLNSVNEGGQKIKNEAEPEFASRLETELKELNTQWDHMCQQVYARKEALKGGLEKTVSLQKDLSEMHEWMTQAEEEYLERDFEYKTPDELQKAVEEMKRAKEEAQQKEAKVKLLTESVNSVIAQAPPVAQEALKKELETLTTNYQWLCTRLNGKCKTLEEVWACWHELLSYLEKANKWLNEVEFKLKTTENIPGGAEEISEVLDSLENLMRHSEDNPNQIRILAQTLTDGGVMDELINEELETFNSRWRELHEEAVRRQKLLEQSIQSAQETEKSLHLIQESLTFIDKQLAAYIADKVDAAQMPQEAQKIQSDLTSHEISLEEMKKHNQGKEAAQRVLSQIDVAQKKLQDVSMKFRLFQKPANFEQRLQESKMILDEVKMHLPALETKSVEQEVVQSQLNHCVNLYKSLSEVKSEVEMVIKTGRQIVQKKQTENPKELDERVTALKLHYNELGAKVTERKQQLEKCLKLSRKMRKEMNVLTEWLAATDMELTKRSAVEGMPSNLDSEVAWGKATQKEIEKQKVHLKSITEVGEALKTVLGKKETLVEDKLSLLNSNWIAVTSRAEEWLNLLLEYQKHMETFDQNVDHITKWIIQADTLLDESEKKKPQQKEDVLKRLKAELNDIRPKVDSTRDQAANLMANRGDHCRKLVEPQISELNHRFAAISHRIKTGKASIPLKELEQFNSDIQKLLEPLEAEIQQGVNLKEEDFNKDMNEDNEGTVKELLQRGDNLQQRITDERKREEIKIKQQLLQTKHNALKDLRSQRRKKALEISHQWYQYKRQADDLLKCLDDIEKKLASLPEPRDERKIKEIDRELQKKKEELNAVRRQAEGLSEDGAAMAVEPTQIQLSKRWREIESKFAQFRRLNFAQIHTVREETMMVMTEDMPLEISYVPSTYLTEITHVSQALLEVEQLLNAPDLCAKDFEDLFKQEESLKNIKDSLQQSSGRIDIIHSKKTAALQSATPVERVKLQEALSQLDFQWEKVNKMYKDRQGRFDRSVEKWRRFHYDIKIFNQWLTEAEQFLRKTQIPENWEHAKYKWYLKELQDGIGQRQTVVRTLNATGEEIIQQSSKTDASILQEKLGSLNLRWQEVCKQLSDRKKRLEEQKNILSEFQRDLNEFVLWLEEADNIASIPLEPGKEQQLKEKLEQVKLLVEELPLRQGILKQLNETGGPVLVSAPISPEEQDKLENKLKQTNLQWIKVSRALPEKQGEIEAQIKDLGQLEKKLEDLEEQLNHLLLWLSPIRNQLEIYNQPNQEGPFDVKETEIAVQAKQPDVEEILSKGQHLYKEKPATQPVKRKLEDLSSEWKAVNRLLQELRAKQPDLAPGLTTIGASPTQTVTLVTQPVVTKETAISKLEMPSSLMLEVPALADFNRAWTELTDWLSLLDQVIKSQRVMVGDLEDINEMIIKQKATMQDLEQRRPQLEELITAAQNLKNKTSNQEARTIITDRIERIQNQWDEVQEHLQNRRQQLNEMLKDSTQWLEAKEEAEQVLGQARAKLESWKEGPYTVDAIQKKITETKQLAKDLRQWQTNVDVANDLALKLLRDYSADDTRKVHMITENINASWRSIHKRVSEREAALEETHRLLQQFPLDLEKFLAWLTEAETTANVLQDATRKERLLEDSKGVKELMKQWQDLQGEIEAHTDVYHNLDENSQKILRSLEGSDDAVLLQRRLDNMNFKWSELRKKSLNIRSHLEASSDQWKRLHLSLQELLVWLQLKDDELSRQAPIGGDFPAVQKQNDVHRAFKRELKTKEPVIMSTLETVRIFLTEQPLEGLEKLYQEPRELPPEERAQNVTRLLRKQAEEVNTEWEKLNLHSADWQRKIDETLERLRELQEATDELDLKLRQAEVIKGSWQPVGDLLIDSLQDHLEKVKALRGEIAPLKENVSHVNDLARQLTTLGIQLSPYNLSTLEDLNTRWKLLQVAVEDRVRQLHEAHRDFGPASQHFLSTSVQGPWERAISPNKVPYYINHETQTTCWDHPKMTELYQSLADLNNVRFSAYRTAMKLRRLQKALCLDLLSLSAACDALDQHNLKQNDQPMDILQIINCLTTIYDRLEQEHNNLVNVPLCVDMCLNWLLNVYDTGRTGRIRVLSFKTGIISLCKAHLEDKYRYLFKQVASSTGFCDQRRLGLLLHDSIQIPRQLGEVASFGGSNIEPSVRSCFQFANNKPEIEAALFLDWMRLEPQSMVWLPVLHRVAAAETAKHQAKCNICKECPIIGFRYRSLKHFNYDICQSCFFSGRVAKGHKMHYPMVEYCTPTTSGEDVRDFAKVLKNKFRTKRYFAKHPRMGYLPVQTVLEGDNMETPVTLINFWPVDSAPASSPQLSHDDTHSRIEHYASRLAEMENSNGSYLNDSISPNESIDDEHLLIQHYCQSLNQDSPLSQPRSPAQILISLESEERGELERILADLEEENRNLQAEYDRLKQQHEHKGLSPLPSPPEMMPTSPQSPRDAELIAEAKLLRQHKGRLEARMQILEDHNKQLESQLHRLRQLLEQPQAEAKVNGTTVSSPSTSLQRSDSSQPMLLRVVGSQTSDSMGEEDLLSPPQDTSTGLEEVMEQLNNSFPSSRGHNVGSLFHMADDLGRAMESLVSVMTDEEGAE

SEQ ID NO: 40 - DNA, 13800 bp, Homo sapiens
actttccccctacaggactcagatctgggaggcaattaccttcggagaaaaacgaataggaaaaactgaagtgttactttttttaaagctgctgaagtttgttggtttctcattgtttttaagcctactggagcaataaagtttgaagaacttttaccaggttttttttatcgctgccttgatatacacttttcaaaatgctttggtgggaagaagtagaggactgttatgaaagagaagatgttcaaaagaaaacattcacaaaatgggtaaatgcacaattttctaagtttgggaagcagcatattgagaacctcttcagtgacctacaggatgggaggcgcctcctagacctcctcgaaggcctgacagggcaaaaactgccaaaagaaaaaggatccacaagagttcatgccctgaacaatgtcaacaaggcactgcgggttttgcagaacaataatgttgatttagtgaatattggaagtactgacatcgtagatggaaatcataaactgactcttggtttgatttggaatataatcctccactggcaggtcaaaaatgtaatgaaaaatatcatggctggattgcaacaaaccaacagtgaaaagattctcctgagctgggtccgacaatcaactcgtaattatccacaggttaatgtaatcaacttcaccaccagctggtctgatggcctggctttgaatgctctcatccatagtcataggccagacctatttgactggaatagtgtggtttgccagcagtcagccacacaacgactggaacatgcattcaacatcgccagatatcaattaggcatagagaaactactcgatcctgaagatgttgataccacctatccagataagaagtccatcttaatgtacatcacatcactcttccaagttttgcctcaacaagtgagcattgaagccatccaggaagtggaaatgttgccaaggccacctaaagtgactaaagaagaacattttcagttacatcatcaaatgcactattctcaacagatcacggtcagtctagcacagggatatgagagaacttcttcccctaagcctcgattcaagagctatgcctacacacaggctgcttatgtcaccacctctgaccctacacggagcccatttccttcacagcatttggaagctcctgaagacaagtcatttggcagttcattgatggagagtgaagtaaacctggaccgttatcaaacagctttagaagaagtattatcgtggcttctttctgctgaggacacattgcaagcacaaggagagatttctaatgatgtggaagtggtgaaagaccagtttcatactcatgaggggtacatgatggatttgacagcccatcagggccgggttggtaatattctacaattgggaagtaagctgattggaacaggaaaattatcagaagatgaagaaactgaagtacaagagcagatgaatctcctaaattcaagatgggaatgcctcagggtagctagcatggaaaaacaaagcaatttacatagagttttaatggatctccagaatcagaaactgaaagagttgaatgactggctaacaaaaacagaagaaagaacaaggaaaatggaggaagagcctcttggacctgatcttgaagacctaaaacgccaagtacaacaacataaggtgcttcaagaagatctagaacaagaacaagtcagggtcaattctctcactcacatggtggtggtagttgatgaatctagtggagatcacgcaactgctgctttggaagaacaacttaaggtattgggagatcgatgggcaaacatctgtagatggacagaagaccgctgggttcttttacaagacatccttctcaaatggcaacgtcttactgaagaacagtgcctttttagtgcatggctttcagaaaaagaagatgcagtgaacaagattcacacaactggctttaaagatcaaaatgaaatgttatcaagtcttcaaaaactggccgttttaaaagcggatctagaaaagaaaaagcaatccatgggcaaactgtattcactcaaacaagatcttctttcaacactgaagaataagtcagtgacccagaagacggaagcatggctggataactttgcccggtgttgggataatttagtccaaaaacttgaaaagagtacagcacagatttcacaggctgtcaccaccactcagccatcactaacacagacaactgtaatggaaacagtaactacggtgaccacaagggaacagatcctggtaaagcatgctcaagaggaacttccaccaccacctccccaaaagaagaggcagattactgtggattctgaaattaggaaaaggttggatgttgatataactgaacttcacagctggattactcgctcagaagctgtgttgcagagtcctgaatttgcaatctttcggaaggaaggcaacttctcagacttaaaagaaaaagtcaatgccatagagcgagaaaaagctgagaagttcagaaaactgcaagatgccagcagatcagctcaggccctggtggaacagatggtgaatgagggtgttaatgcagatagcatcaaacaagcctcagaacaactgaacagccggtggatcgaattctgccagttgctaagtgagagacttaactggctggagtatcagaacaacatcatcgctttctataatcagctacaacaattggagcagatgacaactactgctgaaaactggttgaaaatccaacccaccaccccatcagagccaacagcaattaaaagtcagttaaaaatttgtaaggatgaagtcaaccggctatcagatcttcaacctcaaattgaacgattaaaaattcaaagcatagccctgaaagagaaaggacaaggacccatgttcctggatgcagactttgtggcctttacaaatcattttaagcaagtcttttctgatgtgcaggccagagagaaagagctacagacaatttttgacactttgccaccaatgcgctatcaggagaccatgagtgccatcaggacatgggtccagcagtcagaaaccaaactctccatacctcaacttagtgtcaccgactatgaaatcatggagcagagactcggggaattgcaggctttacaaagttctctgcaagagcaacaaagtggcctatactatctcagcaccactgtgaaagagatgtcgaagaaagcgccctctgaaattagccggaaatatcaatcagaatttgaagaaattgagggacgctggaagaagctctcctcccagctggttgagcattgtcaaaagctagaggagcaaatgaataaactccgaaaaattcagaatcacatacaaaccctgaagaaatggatggctgaagttgatgtttttctgaaggaggaatggcctgcccttggggattcagaaattctaaaaaagcagctgaaacagtgcagacttttagtcagtgatattcagacaattcagcccagtctaaacagtgtcaatgaaggtgggcagaagataaagaatgaagcagagccagagtttgcttcgagacttgagacagaactcaaagaacttaacactcagtgggatcacatgtgccaacaggtctatgccagaaaggaggccttgaagggaggtttggagaaaactgtaagcctccagaaagatctatcagagatgcacgaatggatgacacaagctgaagaagagtatcttgagagagattttgaatataaaactccagatgaattacagaaagcagttgaagagatgaagagagctaaagaagaggcccaacaaaaagaagcgaaagtgaaactccttactgagtctgtaaatagtgtcatagctcaagctccacctgtagcacaagaggccttaaaaaaggaacttgaaactctaaccaccaactaccagtggctctgcactaggctgaatgggaaatgcaagactttggaagaagtttgggcatgttggcatgagttattgtcatacttggagaaagcaaacaagtggctaaatgaagtagaatttaaacttaaaaccactgaaaacattcctggcggagctgaggaaatctctgaggtgctagattcacttgaaaatttgatgcgacattcagaggataacccaaatcagattcgcatattggcacagaccctaacagatggcggagtcatggatgagctaatcaatgaggaacttgagacatttaattctcgttggagggaactacatgaagaggctgtaaggaggcaaaagttgcttgaacagagcatccagtctgcccaggagactgaaaaatccttacacttaatccaggagtccctcacattcattgacaagcagttggcagcttatattgcagacaaggtggacgcagctcaaatgcctcaggaagcccagaaaatccaatctgatttgacaagtcatgagatcagtttagaagaaatgaagaaacataatcaggggaaggaggctgcccaaagagtcctgtctcagattgatgttgcacagaaaaaattacaagatgtctccatgaagtttcgattattccagaaaccagccaattttgagcagcgtctacaagaaagtaagatgattttagatgaagtgaagatgcacttgcctgcattggaaacaaagagtgtggaacaggaagtagtacagtcacagctaaatcattgtgtgaacttgtataaaagtctgagtgaagtgaagtctgaagtggaaatggtgataaagactggacgtcagattgtacagaaaaagcagacggaaaatcccaaagaacttgatgaaagagtaacagctttgaaattgcattataatgagctgggagcaaaggtaacagaaagaaagcaacagttggagaaatgcttgaaattgtcccgtaagatgcgaaaggaaatgaatgtcttgacagaatggctggcagctacagatatggaattgacaaagagatcagcagttgaaggaatgcctagtaatttggattctgaagttgcctggggaaaggctactcaaaaagagattgagaaacagaaggtgcacctgaagagtatcacagaggtaggagaggccttgaaaacagttttgggcaagaaggagacgttggtggaagataaactcagtcttctgaatagtaactggatagctgtcacctcccgagcagaagagtggttaaatcttttgttggaataccagaaacacatggaaacttttgaccagaatgtggaccacatcacaaagtggatcattcaggctgacacacttttggatgaatcagagaaaaagaaaccccagcaaaaagaagacgtgcttaagcgtttaaaggcagaactgaatgacatacgcccaaaggtggactctacacgtgaccaagcagcaaacttgatggcaaaccgcggtgaccactgcaggaaattagtagagccccaaatctcagagctcaaccatcgatttgcagccatttcacacagaattaagactggaaagaatgaagacaatgagggtactgtaaaagaattgttgcaaagaggagacaacttacaacaaagaatcacagatgagagaaagcgagaggaaataaagataaaacagcagctgttacagacaaaacataatgctctcaaggatttgaggtctcaaagaagaaaaaaggctctagaaatttctcatcagtggtatcagtacaagaggcaggctgatgatctcctgaaatgcttggatgacattgaaaaaaaattagccagcctacctgagcccagagatgaaaggaaaataaaggaaattgatcgggaattgcagaagaagaaagaggagctgaatgcagtgcgtaggcaagctgagggcttgtctgaggatggggccgcaatggcagtggagccaactcagatccagctcagcaagcgctggcgggaaattgagagcaaatttgctcagtttcgaagactcaactttgcacaaattcacactgtccgtgaagaaacgatgatggtgatgactgaagacatgcctttggaaatttcttatgtgccttctacttatttgactgaaatcactcatgtctcacaagccctattagaagtggaacaacttctcaatgctcctgacctctgtgctaaggactttgaagatctctttaagcaagaggagtctctgaagaatataaaagatagtctacaacaaagctcaggtcggattgacattattcatagcaagaagacagcagcattgcaaagtgcaacgcctgtggaaagggtgaagctacaggaagctctctcccagcttgatttccaatgggaaaaagttaacaaaatgtacaaggaccgacaagggcgatttgacagatctgttgagaaatggcggcgttttcattatgatataaagatatttaatcagtggctaacagaagctgaacagtttctcagaaagacacaaattcctgagaattgggaacatgctaaatacaaatggtatcttaaggaactccaggatggcattgggcagcggcaaactgttgtcagaacattgaatgcaactggggaagaaataattcagcaatcctcaaaaacagatgccagtattctacaggaaaaattgggaagcctgaatctgcggtggcaggaggtctgcaaacagctgtcagacagaaaaaagaggctagaagaacaaaagaatatcttgtcagaatttcaaagagatttaaatgaatttgttttatggttggaggaagcagataacattgctagtatcccacttgaacctggaaaagagcagcaactaaaagaaaagcttgagcaagtcaagttactggtggaagagttgcccctgcgccagggaattctcaaacaattaaatgaaactggaggacccgtgcttgtaagtgctcccataagcccagaagagcaagataaacttgaaaataagctcaagcagacaaatctccagtggataaaggtttccagagctttacctgagaaacaaggagaaattgaagctcaaataaaagaccttgggcagcttgaaaaaaagcttgaagaccttgaagagcagttaaatcatctgctgctgtggttatctcctattaggaatcagttggaaatttataaccaaccaaaccaagaaggaccatttgacgttaaggaaactgaaatagcagttcaagctaaacaaccggatgtggaagagattttgtctaaagggcagcatttgtacaaggaaaaaccagccactcagccagtgaagaggaagttagaagatctgagctctgagtggaaggcggtaaaccgtttacttcaagagctgagggcaaagcagcctgacctagctcctggactgaccactattggagcctctcctactcagactgttactctggtgacacaacctgtggttactaaggaaactgccatctccaaactagaaatgccatcttccttgatgttggaggtacctgctctggcagatttcaaccgggcttggacagaacttaccgactggctttctctgcttgatcaagttataaaatcacagagggtgatggtgggtgaccttgaggatatcaacgagatgatcatcaagcagaaggcaacaatgcaggatttggaacagaggcgtccccagttggaagaactcattaccgctgcccaaaatttgaaaaacaagaccagcaatcaagaggctagaacaatcattacggatcgaattgaaagaattcagaatcagtgggatgaagtacaagaacaccttcagaaccggaggcaacagttgaatgaaatgttaaaggattcaacacaatggctggaagctaaggaagaagctgagcaggtcttaggacaggccagagccaagcttgagtcatggaaggagggtccctatacagtagatgcaatccaaaagaaaatcacagaaaccaagcagttggccaaagacctccgccagtggcagacaaatgtagatgtggcaaatgacttggccctgaaacttctccgggattattctgcagatgataccagaaaagtccacatgataacagagaatatcaatgcctcttggagaagcattcataaaagggtgagtgagcgagaggctgctttggaagaaactcatagattactgcaacagttccccctggacctggaaaagtttcttgcctggcttacagaagctgaaacaactgccaatgtcctacaggatgctacccgtaaggaaaggctcctagaagactccaagggagtaaaagagctgatgaaacaatggcaagacctccaaggtgaaattgaagctcacacagatgtttatcacaacctggatgaaaacagccaaaaaatcctgagatccctggaaggttccgatgatgcagtcctgttacaaagacgtttggataacatgaacttcaagtggagtgaacttcggaaaaagtctctcaacattaggtcccatttggaagccagttctgaccagtggaagcgtctgcacctttctctgcaggaacttctggtgtggctacagctgaaagatgatgaattaagccggcaggcacctattggaggcgactttccagcagttcagaagcagaacgatgtacatagggccttcaagagggaattgaaaactaaagaacctgtaatcatgagtactcttgagactgtacgaatatttctgacagagcagcctttggaaggactagagaaactctaccaggagcccagagagctgcctcctgaggagagagcccagaatgtcactcggcttctacgaaagcaggctgaggaggtcaatactgagtgggaaaaattgaacctgcactccgctgactggcagagaaaaatagatgagacccttgaaagactccgggaacttcaagaggccacggatgagctggacctcaagctgcgccaagctgaggtgatcaagggatcctggcagcccgtgggcgatctcctcattgactctctccaagatcacctcgagaaagtcaaggcacttcgaggagaaattgcgcctctgaaagagaacgtgagccacgtcaatgaccttgctcgccagcttaccactttgggcattcagctctcaccgtataacctcagcactctggaagacctgaacaccagatggaagcttctgcaggtggccgtcgaggaccgagtcaggcagctgcatgaagcccacagggactttggtccagcatctcagcactttctttccacgtctgtccagggtccctgggagagagccatctcgccaaacaaagtgccctactatatcaaccacgagactcaaacaacttgctgggaccatcccaaaatgacagagctctaccagtctttagctgacctgaataatgtcagattctcagcttataggactgccatgaaactccgaagactgcagaaggccctttgcttggatctcttgagcctgtcagctgcatgtgatgccttggaccagcacaacctcaagcaaaatgaccagcccatggatatcctgcagattattaattgtttgaccactatttatgaccgcctggagcaagagcacaacaatttggtcaacgtccctctctgcgtggatatgtgtctgaactggctgctgaatgtttatgatacgggacgaacagggaggatccgtgtcctgtcttttaaaactggcatcatttccctgtgtaaagcacatttggaagacaagtacagataccttttcaagcaagtggcaagttcaacaggattttgtgaccagcgcaggctgggcctccttctgcatgattctatccaaattccaagacagttgggtgaagttgcatcctttgggggcagtaacattgagccaagtgtccggagctgcttccaatttgctaataataagccagagatcgaagcggccctcttcctagactggatgagactggaaccccagtccatggtgtggctgcccgtcctgcacagagtggctgctgcagaaactgccaagcatcaggccaaatgtaacatctgcaaagagtgtccaatcattggattcaggtacaggagtctaaagcactttaattatgacatctgccaaagctgctttttttctggtcgagttgcaaaaggccataaaatgcactatcccatggtggaatattgcactccgactacatcaggagaagatgttcgagactttgccaaggtactaaaaaacaaatttcgaaccaaaaggtattttgcgaagcatccccgaatgggctacctgccagtgcagactgtcttagagggggacaacatggaaactcccgttactctgatcaacttctggccagtagattctgcgcctgcctcgtcccctcagctttcacacgatgatactcattcacgcattgaacattatgctagcaggctagcagaaatggaaaacagcaatggatcttatctaaatgatagcatctctcctaatgagagcatagatgatgaacatttgttaatccagcattactgccaaagtttgaaccaggactcccccctgagccagcctcgtagtcctgcccagatcttgatttccttagagagtgaggaaagaggggagctagagagaatcctagcagatcttgaggaagaaaacaggaatctgcaagcagaatatgaccgtctaaagcagcagcacgaacataaaggcctgtccccactgccgtcccctcctgaaatgatgcccacctctccccagagtccccgggatgctgagctcattgctgaggccaagctactgcgtcaacacaaaggccgcctggaagccaggatgcaaatcctggaagaccacaataaacagctggagtcacagttacacaggctaaggcagctgctggagcaaccccaggcagaggccaaagtgaatggcacaacggtgtcctctccttctacctctctacagaggtccgacagcagtcagcctatgctgctccgagtggttggcagtcaaacttcggactccatgggtgaggaagatcttctcagtcctccccaggacacaagcacagggttagaggaggtgatggagcaactcaacaactccttccctagttcaagaggacacaatgtaggaagtcttttccacatggcagatgatttgggcagagcgatggagtccttagtatcagtcatgacagatgaagaaggagcagaataaatgttttacaactcctgattcccgcatggtttttataatattcatacaacaaagaggattagacagtaagagtttacaagaaataaatctatatttttgtgaagggtagtggtattatactgtagatttcagtagtttctaagtctgttattgttttgttaacaatggcaggttttacacgtctatgcaattgtacaaaaaagttataagaaaactacatgtaaaatcttgatagctaaataacttgccatttctttatatggaacgcattttgggttgtttaaaaatttataacagttataaagaaagattgtaaactaaagtgtgctttataaaaaaaagttgtttataaaaacccctaaaaacaaaacaaacacacacacacacacatacacacacacacacaaaactttgaggcagcgcattgttttgcatccttttggcgtgatatccatatgaaattcatggctttttctttttttgcatattaaagataagacttcctctaccaccacaccaaatgactactacacactgctcatttgagaactgtcagctgagtggggcaggcttgagttttcatttcatatatctatatgtctataagtatataaatactatagttatatagataaagagatacgaatttctatagactgactttttccattttttaaatgttcatgtcacatcctaatagaaagaaattacttctagtcagtcatccaggcttacctgcttggtctagaatggatttttcccggagccggaagccaggaggaaactacaccacactaaaacattgtctacagctccagatgtttctcattttaaacaactttccactgacaacgaaagtaaagtaaagtattggatttttttaaagggaacatgtgaatgaatacacaggacttattatatcagagtgagtaatcggttggttggttgattgattgattgattgatacattcagcttcctgctgctagcaatgccacgatttagatttaatgatgcttcagtggaaatcaatcagaaggtattctgaccttgtgaacatcagaaggtattttttaactcccaagcagtagcaggacgatgatagggctggagggctatggattcccagcccatccctgtgaaggagtaggccactctttaagtgaaggattggatgattgttcataatacataaagttctctgtaattacaactaaattattatgccctcttctcacagtcaaaaggaactgggtggtttggtttttgttgcttttttagatttattgtcccatgtgggatgagtttttaaatgccacaagacataatttaaaataaataaactttgggaaaaggtgtaaaacagtagccccatcacatttgtgatactgacaggtatcaacccagaagcccatgaactgtgtttccatcctttgcatttctctgcgagtagttccacacaggtttgtaagtaagtaagaaagaaggcaaattgattcaaatgttacaaaaaaacccttcttggtggattagacaggttaaatatataaacaaacaaacaaaaattgctcaaaaaagaggagaaaagctcaagaggaaaagctaaggactggtaggaaaaagctttactctttcatgccattttatttctttttgatttttaaatcattcattcaatagataccaccgtgtgacctataattttgcaaatctgttacctctgacatcaagtgtaattagcttttggagagtgggctgacatcaagtgtaattagcttttggagagtgggttttgtccattattaataattaattaattaacatcaaacacggcttctcatgctatttctacctcactttggttttggggtgttcctgataattgtgcacacctgagttcacagcttcaccacttgtccattgcgttattttctttttcctttataattctttctttttccttcataattttcaaaagaaaacccaaagctctaaggtaacaaattaccaaattacatgaagatttggtttttgtcttgcatttttttcctttatgtgacgctggaccttttctttacccaaggatttttaaaactcagatttaaaacaaggggttactttacatcctactaagaagtttaagtaagtaagtttcattctaaaatcagaggtaaatagagtgcataaataattttgttttaatctttttgtttttcttttagacacattagctctggagtgagtctgtcataatatttgaacaaaaattgagagctttattgctgcattttaagcataattaatttggacattatttcgtgttgtgttctttataaccaccaagtattaaactgtaaatcataatgtaactgaagcataaacatcacatggcatgttttgtcattgttttcaggtactgagttcttacttgagtatcataatatattgtgttttaacaccaacactgtaacatttacgaattatttttttaaacttcagttttactgcattttcacaacatatcagacttcaccaaatatatgccttactattgtattatagtactgctttactgtgtatctcaataaagcacgcagttatgttacaaaaaagta

SEQ ID NO: 41 - protein, 3662 aa, Homo sapiens
MLWWEEVEDCYEREDVQKKTFTKWVNAQFSKFGKQHIENLFSDLQDGRRLLDLLEGLTGQKLPKEKGSTRVHALNNVNKALRVLQNNNVDLVNIGSTDIVDGNHKLTLGLIWNIILHWQVKNVMKNIMAGLQQTNSEKILLSWVRQSTRNYPQVNVINFTTSWSDGLALNALIHSHRPDLFDWNSVVCQQSATQRLEHAFNIARYQLGIEKLLDPEDVDTTYPDKKSILMYITSLFQVLPQQVSIEAIQEVEMLPRPPKVTKEEHFQLHHQMHYSQQITVSLAQGYERTSSPKPRFKSYAYTQAAYVTTSDPTRSPFPSQHLEAPEDKSFGSSLMESEVNLDRYQTALEEVLSWLLSAEDTLQAQGEISNDVEVVKDQFHTHEGYMMDLTAHQGRVGNILQLGSKLIGTGKLSEDEETEVQEQMNLLNSRWECLRVASMEKQSNLHRVLMDLQNQKLKELNDWLTKTEERTRKMEEEPLGPDLEDLKRQVQQHKVLQEDLEQEQVRVNSLTHMVVVVDESSGDHATAALEEQLKVLGDRWANICRWTEDRWVLLQDILLKWQRLTEEQCLFSAWLSEKEDAVNKIHTTGFKDQNEMLSSLQKLAVLKADLEKKKQSMGKLYSLKQDLLSTLKNKSVTQKTEAWLDNFARCWDNLVQKLEKSTAQISQAVTTTQPSLTQTTVMETVTTVTTREQILVKHAQEELPPPPPQKKRQITVDSEIRKRLDVDITELHSWITRSEAVLQSPEFAIFRKEGNFSDLKEKVNAIEREKAEKFRKLQDASRSAQALVEQMVNEGVNADSIKQASEQLNSRWIEFCQLLSERLNWLEYQNNIIAFYNQLQQLEQMTTTAENWLKIQPTTPSEPTAIKSQLKICKDEVNRLSDLQPQIERLKIQSIALKEKGQGPMFLDADFVAFTNHFKQVFSDVQAREKELQTIFDTLPPMRYQETMSAIRTWVQQSETKLSIPQLSVTDYEIMEQRLGELQALQSSLQEQQSGLYYLSTTVKEMSKKAPSEISRKYQSEFEEIEGRWKKLSSQLVEHCQKLEEQMNKLRKIQNHIQTLKKWMAEVDVFLKEEWPALGDSEILKKQLKQCRLLVSDIQTIQPSLNSVNEGGQKIKNEAEPEFASRLETELKELNTQWDHMCQQVYARKEALKGGLEKTVSLQKDLSEMHEWMTQAEEEYLERDFEYKTPDELQKAVEEMKRAKEEAQQKEAKVKLLTESVNSVIAQAPPVAQEALKKELETLTTNYQWLCTRLNGKCKTLEEVWACWHELLSYLEKANKWLNEVEFKLKTTENIPGGAEEISEVLDSLENLMRHSEDNPNQIRILAQTLTDGGVMDELINEELETFNSRWRELHEEAVRRQKLLEQSIQSAQETEKSLHLIQESLTFIDKQLAAYIADKVDAAQMPQEAQKIQSDLTSHEISLEEMKKHNQGKEAAQRVLSQIDVAQKKLQDVSMKFRLFQKPANFEQRLQESKMILDEVKMHLPALETKSVEQEVVQSQLNHCVNLYKSLSEVKSEVEMVIKTGRQIVQKKQTENPKELDERVTALKLHYNELGAKVTERKQQLEKCLKLSRKMRKEMNVLTEWLAATDMELTKRSAVEGMPSNLDSEVAWGKATQKEIEKQKVHLKSITEVGEALKTVLGKKETLVEDKLSLLNSNWIAVTSRAEEWLNLLLEYQKHMETFDQNVDHITKWIIQADTLLDESEKKKPQQKEDVLKRLKAELNDIRPKVDSTRDQAANLMANRGDHCRKLVEPQISELNHRFAAISHRIKTGKNEDNEGTVKELLQRGDNLQQRITDERKREEIKIKQQLLQTKHNALKDLRSQRRKKALEISHQWYQYKRQADDLLKCLDDIEKKLASLPEPRDERKIKEIDRELQKKKEELNAVRRQAEGLSEDGAAMAVEPTQIQLSKRWREIESKFAQFRRLNFAQIHTVREETMMVMTEDMPLEISYVPSTYLTEITHVSQALLEVEQLLNAPDLCAKDFEDLFKQEESLKNIKDSLQQSSGRIDIIHSKKTAALQSATPVERVKLQEALSQLDFQWEKVNKMYKDRQGRFDRSVEKWRRFHYDIKIFNQWLTEAEQFLRKTQIPENWEHAKYKWYLKELQDGIGQRQTVVRTLNATGEEIIQQSSKTDASILQEKLGSLNLRWQEVCKQLSDRKKRLEEQKNILSEFQRDLNEFVLWLEEADNIASIPLEPGKEQQLKEKLEQVKLLVEELPLRQGILKQLNETGGPVLVSAPISPEEQDKLENKLKQTNLQWIKVSRALPEKQGEIEAQIKDLGQLEKKLEDLEEQLNHLLLWLSPIRNQLEIYNQPNQEGPFDVKETEIAVQAKQPDVEEILSKGQHLYKEKPATQPVKRKLEDLSSEWKAVNRLLQELRAKQPDLAPGLTTIGASPTQTVTLVTQPVVTKETAISKLEMPSSLMLEVPALADFNRAWTELTDWLSLLDQVIKSQRVMVGDLEDINEMIIKQKATMQDLEQRRPQLEELITAAQNLKNKTSNQEARTIITDRIERIQNQWDEVQEHLQNRRQQLNEMLKDSTQWLEAKEEAEQVLGQARAKLESWKEGPYTVDAIQKKITETKQLAKDLRQWQTNVDVANDLALKLLRDYSADDTRKVHMITENINASWRSIHKRVSEREAALEETHRLLQQFPLDLEKFLAWLTEAETTANVLQDATRKERLLEDSKGVKELMKQWQDLQGEIEAHTDVYHNLDENSQKILRSLEGSDDAVLLQRRLDNMNFKWSELRKKSLNIRSHLEASSDQWKRLHLSLQELLVWLQLKDDELSRQAPIGGDFPAVQKQNDVHRAFKRELKTKEPVIMSTLETVRIFLTEQPLEGLEKLYQEPRELPPEERAQNVTRLLRKQAEEVNTEWEKLNLHSADWQRKIDETLERLRELQEATDELDLKLRQAEVIKGSWQPVGDLLIDSLQDHLEKVKALRGEIAPLKENVSHVNDLARQLTTLGIQLSPYNLSTLEDLNTRWKLLQVAVEDRVRQLHEAHRDFGPASQHFLSTSVQGPWERAISPNKVPYYINHETQTTCWDHPKMTELYQSLADLNNVRFSAYRTAMKLRRLQKALCLDLLSLSAACDALDQHNLKQNDQPMDILQIINCLTTIYDRLEQEHNNLVNVPLCVDMCLNWLLNVYDTGRTGRIRVLSFKTGIISLCKAHLEDKYRYLFKQVASSTGFCDQRRLGLLLHDSIQIPRQLGEVASFGGSNIEPSVRSCFQFANNKPEIEAALFLDWMRLEPQSMVWLPVLHRVAAAETAKHQAKCNICKECPIIGFRYRSLKHFNYDICQSCFFSGRVAKGHKMHYPMVEYCTPTTSGEDVRDFAKVLKNKFRTKRYFAKHPRMGYLPVQTVLEGDNMETPVTLINFWPVDSAPASSPQLSHDDTHSRIEHYASRLAEMENSNGSYLNDSISPNESIDDEHLLIQHYCQSLNQDSPLSQPRSPAQILISLESEERGELERILADLEEENRNLQAEYDRLKQQHEHKGLSPLPSPPEMMPTSPQSPRDAELIAEAKLLRQHKGRLEARMQILEDHNKQLESQLHRLRQLLEQPQAEAKVNGTTVSSPSTSLQRSDSSQPMLLRVVGSQTSDSMGEEDLLSPPQDTSTGLEEVMEQLNNSFPSSRGHNVGSLFHMADDLGRAMESLVSVMTDEEGAE

SEQ ID NO: 42 - DNA, 13785 bp, Homo sapiens
actttccccctacaggactcagatctgggaggcaattaccttcggagaaaaacgaataggaaaaactgaagtgttactttttttaaagctgctgaagtttgttggtttctcattgtttttaagcctactggagcaataaagtttgaagaacttttaccaggttttttttatcgctgccttgatatacacttttcaaaatgctttggtgggaagaagtagaggactgttatgaaagagaagatgttcaaaagaaaacattcacaaaatgggtaaatgcacaattttctaagtttgggaagcagcatattgagaacctcttcagtgacctacaggatgggaggcgcctcctagacctcctcgaaggcctgacagggcaaaaactgccaaaagaaaaaggatccacaagagttcatgccctgaacaatgtcaacaaggcactgcgggttttgcagaacaataatgttgatttagtgaatattggaagtactgacatcgtagatggaaatcataaactgactcttggtttgatttggaatataatcctccactggcaggtcaaaaatgtaatgaaaaatatcatggctggattgcaacaaaccaacagtgaaaagattctcctgagctgggtccgacaatcaactcgtaattatccacaggttaatgtaatcaacttcaccaccagctggtctgatggcctggctttgaatgctctcatccatagtcataggccagacctatttgactggaatagtgtggtttgccagcagtcagccacacaacgactggaacatgcattcaacatcgccagatatcaattaggcatagagaaactactcgatcctgaagatgttgataccacctatccagataagaagtccatcttaatgtacatcacatcactcttccaagttttgcctcaacaagtgagcattgaagccatccaggaagtggaaatgttgccaaggccacctaaagtgactaaagaagaacattttcagttacatcatcaaatgcactattctcaacagatcacggtcagtctagcacagggatatgagagaacttcttcccctaagcctcgattcaagagctatgcctacacacaggctgcttatgtcaccacctctgaccctacacggagcccatttccttcacagcatttggaagctcctgaagacaagtcatttggcagttcattgatggagagtgaagtaaacctggaccgttatcaaacagctttagaagaagtattatcgtggcttctttctgctgaggacacattgcaagcacaaggagagatttctaatgatgtggaagtggtgaaagaccagtttcatactcatgaggggtacatgatggatttgacagcccatcagggccgggttggtaatattctacaattgggaagtaagctgattggaacaggaaaattatcagaagatgaagaaactgaagtacaagagcagatgaatctcctaaattcaagatgggaatgcctcagggtagctagcatggaaaaacaaagcaatttacatagagttttaatggatctccagaatcagaaactgaaagagttgaatgactggctaacaaaaacagaagaaagaacaaggaaaatggaggaagagcctcttggacctgatcttgaagacctaaaacgccaagtacaacaacataaggtgcttcaagaagatctagaacaagaacaagtcagggtcaattctctcactcacatggtggtggtagttgatgaatctagtggagatcacgcaactgctgctttggaagaacaacttaaggtattgggagatcgatgggcaaacatctgtagatggacagaagaccgctgggttcttttacaagacatccttctcaaatggcaacgtcttactgaagaacagtgcctttttagtgcatggctttcagaaaaagaagatgcagtgaacaagattcacacaactggctttaaagatcaaaatgaaatgttatcaagtcttcaaaaactggccgttttaaaagcggatctagaaaagaaaaagcaatccatgggcaaactgtattcactcaaacaagatcttctttcaacactgaagaataagtcagtgacccagaagacggaagcatggctggataactttgcccggtgttgggataatttagtccaaaaacttgaaaagagtacagcacagatttcacaggctgtcaccaccactcagccatcactaacacagacaactgtaatggaaacagtaactacggtgaccacaagggaacagatcctggtaaagcatgctcaagaggaacttccaccaccacctccccaaaagaagaggcagattactgtggattctgaaattaggaaaaggttggatgttgatataactgaacttcacagctggattactcgctcagaagctgtgttgcagagtcctgaatttgcaatctttcggaaggaaggcaacttctcagacttaaaagaaaaagtcaatgccatagagcgagaaaaagctgagaagttcagaaaactgcaagatgccagcagatcagctcaggccctggtggaacagatggtgaatgagggtgttaatgcagatagcatcaaacaagcctcagaacaactgaacagccggtggatcgaattctgccagttgctaagtgagagacttaactggctggagtatcagaacaacatcatcgctttctataatcagctacaacaattggagcagatgacaactactgctgaaaactggttgaaaatccaacccaccaccccatcagagccaacagcaattaaaagtcagttaaaaatttgtaaggatgaagtcaaccggctatcagatcttcaacctcaaattgaacgattaaaaattcaaagcatagccctgaaagagaaaggacaaggacccatgttcctggatgcagactttgtggcctttacaaatcattttaagcaagtcttttctgatgtgcaggccagagagaaagagctacagacaatttttgacactttgccaccaatgcgctatcaggagaccatgagtgccatcaggacatgggtccagcagtcagaaaccaaactctccatacctcaacttagtgtcaccgactatgaaatcatggagcagagactcggggaattgcaggctttacaaagttctctgcaagagcaacaaagtggcctatactatctcagcaccactgtgaaagagatgtcgaagaaagcgccctctgaaattagccggaaatatcaatcagaatttgaagaaattgagggacgctggaagaagctctcctcccagctggttgagcattgtcaaaagctagaggagcaaatgaataaactccgaaaaattcagaatcacatacaaaccctgaagaaatggatggctgaagttgatgtttttctgaaggaggaatggcctgcccttggggattcagaaattctaaaaaagcagctgaaacagtgcagacttttagtcagtgatattcagacaattcagcccagtctaaacagtgtcaatgaaggtgggcagaagataaagaatgaagcagagccagagtttgcttcgagacttgagacagaactcaaagaacttaacactcagtgggatcacatgtgccaacaggtctatgccagaaaggaggccttgaagggaggtttggagaaaactgtaagcctccagaaagatctatcagagatgcacgaatggatgacacaagctgaagaagagtatcttgagagagattttgaatataaaactccagatgaattacagaaagcagttgaagagatgaagagagctaaagaagaggcccaacaaaaagaagcgaaagtgaaactccttactgagtctgtaaatagtgtcatagctcaagctccacctgtagcacaagaggccttaaaaaaggaacttgaaactctaaccaccaactaccagtggctctgcactaggctgaatgggaaatgcaagactttggaagaagtttgggcatgttggcatgagttattgtcatacttggagaaagcaaacaagtggctaaatgaagtagaatttaaacttaaaaccactgaaaacattcctggcggagctgaggaaatctctgaggtgctagattcacttgaaaatttgatgcgacattcagaggataacccaaatcagattcgcatattggcacagaccctaacagatggcggagtcatggatgagctaatcaatgaggaacttgagacatttaattctcgttggagggaactacatgaagaggctgtaaggaggcaaaagttgcttgaacagagcatccagtctgcccaggagactgaaaaatccttacacttaatccaggagtccctcacattcattgacaagcagttggcagcttatattgcagacaaggtggacgcagctcaaatgcctcaggaagcccagaaaatccaatctgatttgacaagtcatgagatcagtttagaagaaatgaagaaacataatcaggggaaggaggctgcccaaagagtcctgtctcagattgatgttgcacagaaaaaattacaagatgtctccatgaagtttcgattattccagaaaccagccaattttgagcagcgtctacaagaaagtaagatgattttagatgaagtgaagatgcacttgcctgcattggaaacaaagagtgtggaacaggaagtagtacagtcacagctaaatcattgtgtgaacttgtataaaagtctgagtgaagtgaagtctgaagtggaaatggtgataaagactggacgtcagattgtacagaaaaagcagacggaaaatcccaaagaacttgatgaaagagtaacagctttgaaattgcattataatgagctgggagcaaaggtaacagaaagaaagcaacagttggagaaatgcttgaaattgtcccgtaagatgcgaaaggaaatgaatgtcttgacagaatggctggcagctacagatatggaattgacaaagagatcagcagttgaaggaatgcctagtaatttggattctgaagttgcctggggaaaggctactcaaaaagagattgagaaacagaaggtgcacctgaagagtatcacagaggtaggagaggccttgaaaacagttttgggcaagaaggagacgttggtggaagataaactcagtcttctgaatagtaactggatagctgtcacctcccgagcagaagagtggttaaatcttttgttggaataccagaaacacatggaaacttttgaccagaatgtggaccacatcacaaagtggatcattcaggctgacacacttttggatgaatcagagaaaaagaaaccccagcaaaaagaagacgtgcttaagcgtttaaaggcagaactgaatgacatacgcccaaaggtggactctacacgtgaccaagcagcaaacttgatggcaaaccgcggtgaccactgcaggaaattagtagagccccaaatctcagagctcaaccatcgatttgcagccatttcacacagaattaagactggaaaggcctccattcctttgaaggaattggagcagtttaactcagatatacaaaaattgcttgaaccactggaggctgaaattcagcagggggtgaatctgaaagaggaagacttcaataaagatatggatttgaggtctcaaagaagaaaaaaggctctagaaatttctcatcagtggtatcagtacaagaggcaggctgatgatctcctgaaatgcttggatgacattgaaaaaaaattagccagcctacctgagcccagagatgaaaggaaaataaaggaaattgatcgggaattgcagaagaagaaagaggagctgaatgcagtgcgtaggcaagctgagggcttgtctgaggatggggccgcaatggcagtggagccaactcagatccagctcagcaagcgctggcgggaaattgagagcaaatttgctcagtttcgaagactcaactttgcacaaattcacactgtccgtgaagaaacgatgatggtgatgactgaagacatgcctttggaaatttcttatgtgccttctacttatttgactgaaatcactcatgtctcacaagccctattagaagtggaacaacttctcaatgctcctgacctctgtgctaaggactttgaagatctctttaagcaagaggagtctctgaagaatataaaagatagtctacaacaaagctcaggtcggattgacattattcatagcaagaagacagcagcattgcaaagtgcaacgcctgtggaaagggtgaagctacaggaagctctctcccagcttgatttccaatgggaaaaagttaacaaaatgtacaaggaccgacaagggcgatttgacagatctgttgagaaatggcggcgttttcattatgatataaagatatttaatcagtggctaacagaagctgaacagtttctcagaaagacacaaattcctgagaattgggaacatgctaaatacaaatggtatcttaaggaactccaggatggcattgggcagcggcaaactgttgtcagaacattgaatgcaactggggaagaaataattcagcaatcctcaaaaacagatgccagtattctacaggaaaaattgggaagcctgaatctgcggtggcaggaggtctgcaaacagctgtcagacagaaaaaagaggctagaagaacaaaagaatatcttgtcagaatttcaaagagatttaaatgaatttgttttatggttggaggaagcagataacattgctagtatcccacttgaacctggaaaagagcagcaactaaaagaaaagcttgagcaagtcaagttactggtggaagagttgcccctgcgccagggaattctcaaacaattaaatgaaactggaggacccgtgcttgtaagtgctcccataagcccagaagagcaagataaacttgaaaataagctcaagcagacaaatctccagtggataaaggtttccagagctttacctgagaaacaaggagaaattgaagctcaaataaaagaccttgggcagcttgaaaaaaagcttgaagaccttgaagagcagttaaatcatctgctgctgtggttatctcctattaggaatcagttggaaatttataaccaaccaaaccaagaaggaccatttgacgttaaggaaactgaaatagcagttcaagctaaacaaccggatgtggaagagattttgtctaaagggcagcatttgtacaaggaaaaaccagccactcagccagtgaagaggaagttagaagatctgagctctgagtggaaggcggtaaaccgtttacttcaagagctgagggcaaagcagcctgacctagctcctggactgaccactattggagcctctcctactcagactgttactctggtgacacaacctgtggttactaaggaaactgccatctccaaactagaaatgccatcttccttgatgttggaggtacctgctctggcagatttcaaccgggcttggacagaacttaccgactggctttctctgcttgatcaagttataaaatcacagagggtgatggtgggtgaccttgaggatatcaacgagatgatcatcaagcagaaggcaacaatgcaggatttggaacagaggcgtccccagttggaagaactcattaccgctgcccaaaatttgaaaaacaagaccagcaatcaagaggctagaacaatcattacggatcgaattgaaagaattcagaatcagtgggatgaagtacaagaacaccttcagaaccggaggcaacagttgaatgaaatgttaaaggattcaacacaatggctggaagctaaggaagaagctgagcaggtcttaggacaggccagagccaagcttgagtcatggaaggagggtccctatacagtagatgcaatccaaaagaaaatcacagaaaccaagcagttggccaaagacctccgccagtggcagacaaatgtagatgtggcaaatgacttggccctgaaacttctccgggattattctgcagatgataccagaaaagtccacatgataacagagaatatcaatgcctcttggagaagcattcataaaagggtgagtgagcgagaggctgctttggaagaaactcatagattactgcaacagttccccctggacctggaaaagtttcttgcctggcttacagaagctgaaacaactgccaatgtcctacaggatgctacccgtaaggaaaggctcctagaagactccaagggagtaaaagagctgatgaaacaatggcaagacctccaaggtgaaattgaagctcacacagatgtttatcacaacctggatgaaaacagccaaaaaatcctgagatccctggaaggttccgatgatgcagtcctgttacaaagacgtttggataacatgaacttcaagtggagtgaacttcggaaaaagtctctcaacattaggtcccatttggaagccagttctgaccagtggaagcgtctgcacctttctctgcaggaacttctggtgtggctacagctgaaagatgatgaattaagccggcaggcacctattggaggcgactttccagcagttcagaagcagaacgatgtacatagggccttcaagagggaattgaaaactaaagaacctgtaatcatgagtactcttgagactgtacgaatatttctgacagagcagcctttggaaggactagagaaactctaccaggagcccagagagctgcctcctgaggagagagcccagaatgtcactcggcttctacgaaagcaggctgaggaggtcaatactgagtgggaaaaattgaacctgcactccgctgactggcagagaaaaatagatgagacccttgaaagactccgggaacttcaagaggccacggatgagctggacctcaagctgcgccaagctgaggtgatcaagggatcctggcagcccgtgggcgatctcctcattgactctctccaagatcacctcgagaaagtcaaggcacttcgaggagaaattgcgcctctgaaagagaacgtgagccacgtcaatgaccttgctcgccagcttaccactttgggcattcagctctcaccgtataacctcagcactctggaagacctgaacaccagatggaagcttctgcaggtggccgtcgaggaccgagtcaggcagctgcatgaagcccacagggactttggtccagcatctcagcactttctttccacgtctgtccagggtccctgggagagagccatctcgccaaacaaagtgccctactatatcaaccacgagactcaaacaacttgctgggaccatcccaaaatgacagagctctaccagtctttagctgacctgaataatgtcagattctcagcttataggactgccatgaaactccgaagactgcagaaggccctttgcttggatctcttgagcctgtcagctgcatgtgatgccttggaccagcacaacctcaagcaaaatgaccagcccatggatatcctgcagattattaattgtttgaccactatttatgaccgcctggagcaagagcacaacaatttggtcaacgtccctctctgcgtggatatgtgtctgaactggctgctgaatgtttatgatacgggacgaacagggaggatccgtgtcctgtcttttaaaactggcatcatttccctgtgtaaagcacatttggaagacaagtacagataccttttcaagcaagtggcaagttcaacaggattttgtgaccagcgcaggctgggcctccttctgcatgattctatccaaattccaagacagttgggtgaagttgcatcctttgggggcagtaacattgagccaagtgtccggagctgcttccaatttgctaataataagccagagatcgaagcggccctcttcctagactggatgagactggaaccccagtccatggtgtggctgcccgtcctgcacagagtggctgctgcagaaactgccaagcatcaggccaaatgtaacatctgcaaagagtgtccaatcattggattcaggtacaggagtctaaagcactttaattatgacatctgccaaagctgctttttttctggtcgagttgcaaaaggccataaaatgcactatcccatggtggaatattgcactccgactacatcaggagaagatgttcgagactttgccaaggtactaaaaaacaaatttcgaaccaaaaggtattttgcgaagcatccccgaatgggctacctgccagtgcagactgtcttagagggggacaacatggaaactcccgttactctgatcaacttctggccagtagattctgcgcctgcctcgtcccctcagctttcacacgatgatactcattcacgcattgaacattatgctagcaggctagcagaaatggaaaacagcaatggatcttatctaaatgatagcatctctcctaatgagagcatagatgatgaacatttgttaatccagcattactgccaaagtttgaaccaggactcccccctgagccagcctcgtagtcctgcccagatcttgatttccttagagagtgaggaaagaggggagctagagagaatcctagcagatcttgaggaagaaaacaggaatctgcaagcagaatatgaccgtctaaagcagcagcacgaacataaaggcctgtccccactgccgtcccctcctgaaatgatgcccacctctccccagagtccccgggatgctgagctcattgctgaggccaagctactgcgtcaacacaaaggccgcctggaagccaggatgcaaatcctggaagaccacaataaacagctggagtcacagttacacaggctaaggcagctgctggagcaaccccaggcagaggccaaagtgaatggcacaacggtgtcctctccttctacctctctacagaggtccgacagcagtcagcctatgctgctccgagtggttggcagtcaaacttcggactccatgggtgaggaagatcttctcagtcctccccaggacacaagcacagggttagaggaggtgatggagcaactcaacaactccttccctagttcaagaggacacaatgtaggaagtcttttccacatggcagatgatttgggcagagcgatggagtccttagtatcagtcatgacagatgaagaaggagcagaataaatgttttacaactcctgattcccgcatggtttttataatattcatacaacaaagaggattagacagtaagagtttacaagaaataaatctatatttttgtgaagggtagtggtattatactgtagatttcagtagtttctaagtctgttattgttttgttaacaatggcaggttttacacgtctatgcaattgtacaaaaaagttataagaaaactacatgtaaaatcttgatagctaaataacttgccatttctttatatggaacgcattttgggttgtttaaaaatttataacagttataaagaaagattgtaaactaaagtgtgctttataaaaaaaagttgtttataaaaacccctaaaaacaaaacaaacacacacacacacacatacacacacacacacaaaactttgaggcagcgcattgttttgcatccttttggcgtgatatccatatgaaattcatggctttttctttttttgcatattaaagataagacttcctctaccaccacaccaaatgactactacacactgctcatttgagaactgtcagctgagtggggcaggcttgagttttcatttcatatatctatatgtctataagtatataaatactatagttatatagataaagagatacgaatttctatagactgactttttccattttttaaatgttcatgtcacatcctaatagaaagaaattacttctagtcagtcatccaggcttacctgcttggtctagaatggatttttcccggagccggaagccaggaggaaactacaccacactaaaacattgtctacagctccagatgtttctcattttaaacaactttccactgacaacgaaagtaaagtaaagtattggatttttttaaagggaacatgtgaatgaatacacaggacttattatatcagagtgagtaatcggttggttggttgattgattgattgattgatacattcagcttcctgctgctagcaatgccacgatttagatttaatgatgcttcagtggaaatcaatcagaaggtattctgaccttgtgaacatcagaaggtattttttaactcccaagcagtagcaggacgatgatagggctggagggctatggattcccagcccatccctgtgaaggagtaggccactctttaagtgaaggattggatgattgttcataatacataaagttctctgtaattacaactaaattattatgccctcttctcacagtcaaaaggaactgggtggtttggtttttgttgcttttttagatttattgtcccatgtgggatgagtttttaaatgccacaagacataatttaaaataaataaactttgggaaaaggtgtaaaacagtagccccatcacatttgtgatactgacaggtatcaacccagaagcccatgaactgtgtttccatcctttgcatttctctgcgagtagttccacacaggtttgtaagtaagtaagaaagaaggcaaattgattcaaatgttacaaaaaaacccttcttggtggattagacaggttaaatatataaacaaacaaacaaaaattgctcaaaaaagaggagaaaagctcaagaggaaaagctaaggactggtaggaaaaagctttactctttcatgccattttatttctttttgatttttaaatcattcattcaatagataccaccgtgtgacctataattttgcaaatctgttacctctgacatcaagtgtaattagcttttggagagtgggctgacatcaagtgtaattagcttttggagagtgggttttgtccattattaataattaattaattaacatcaaacacggcttctcatgctatttctacctcactttggttttggggtgttcctgataattgtgcacacctgagttcacagcttcaccacttgtccattgcgttattttctttttcctttataattctttctttttccttcataattttcaaaagaaaacccaaagctctaaggtaacaaattaccaaattacatgaagatttggtttttgtcttgcatttttttcctttatgtgacgctggaccttttctttacccaaggatttttaaaactcagatttaaaacaaggggttactttacatcctactaagaagtttaagtaagtaagtttcattctaaaatcagaggtaaatagagtgcataaataattttgttttaatctttttgtttttcttttagacacattagctctggagtgagtctgtcataatatttgaacaaaaattgagagctttattgctgcattttaagcataattaatttggacattatttcgtgttgtgttctttataaccaccaagtattaaactgtaaatcataatgtaactgaagcataaacatcacatggcatgttttgtcattgttttcaggtactgagttcttacttgagtatcataatatattgtgttttaacaccaacactgtaacatttacgaattatttttttaaacttcagttttactgcattttcacaacatatcagacttcaccaaatatatgccttactattgtattatagtactgctttactgtgtatctcaataaagcacgcagttatgttacaaaaaagta

SEQ ID NO: 43 - protein, 3657 aa, Homo sapiens
MLWWEEVEDCYEREDVQKKTFTKWVNAQFSKFGKQHIENLFSDLQDGRRLLDLLEGLTGQKLPKEKGSTRVHALNNVNKALRVLQNNNVDLVNIGSTDIVDGNHKLTLGLIWNIILHWQVKNVMKNIMAGLQQTNSEKILLSWVRQSTRNYPQVNVINFTTSWSDGLALNALIHSHRPDLFDWNSVVCQQSATQRLEHAFNIARYQLGIEKLLDPEDVDTTYPDKKSILMYITSLFQVLPQQVSIEAIQEVEMLPRPPKVTKEEHFQLHHQMHYSQQITVSLAQGYERTSSPKPRFKSYAYTQAAYVTTSDPTRSPFPSQHLEAPEDKSFGSSLMESEVNLDRYQTALEEVLSWLLSAEDTLQAQGEISNDVEVVKDQFHTHEGYMMDLTAHQGRVGNILQLGSKLIGTGKLSEDEETEVQEQMNLLNSRWECLRVASMEKQSNLHRVLMDLQNQKLKELNDWLTKTEERTRKMEEEPLGPDLEDLKRQVQQHKVLQEDLEQEQVRVNSLTHMVVVVDESSGDHATAALEEQLKVLGDRWANICRWTEDRWVLLQDILLKWQRLTEEQCLFSAWLSEKEDAVNKIHTTGFKDQNEMLSSLQKLAVLKADLEKKKQSMGKLYSLKQDLLSTLKNKSVTQKTEAWLDNFARCWDNLVQKLEKSTAQISQAVTTTQPSLTQTTVMETVTTVTTREQILVKHAQEELPPPPPQKKRQITVDSEIRKRLDVDITELHSWITRSEAVLQSPEFAIFRKEGNFSDLKEKVNAIEREKAEKFRKLQDASRSAQALVEQMVNEGVNADSIKQASEQLNSRWIEFCQLLSERLNWLEYQNNIIAFYNQLQQLEQMTTTAENWLKIQPTTPSEPTAIKSQLKICKDEVNRLSDLQPQIERLKIQSIALKEKGQGPMFLDADFVAFTNHFKQVFSDVQAREKELQTIFDTLPPMRYQETMSAIRTWVQQSETKLSIPQLSVTDYEIMEQRLGELQALQSSLQEQQSGLYYLSTTVKEMSKKAPSEISRKYQSEFEEIEGRWKKLSSQLVEHCQKLEEQMNKLRKIQNHIQTLKKWMAEVDVFLKEEWPALGDSEILKKQLKQCRLLVSDIQTIQPSLNSVNEGGQKIKNEAEPEFASRLETELKELNTQWDHMCQQVYARKEALKGGLEKTVSLQKDLSEMHEWMTQAEEEYLERDFEYKTPDELQKAVEEMKRAKEEAQQKEAKVKLLTESVNSVIAQAPPVAQEALKKELETLTTNYQWLCTRLNGKCKTLEEVWACWHELLSYLEKANKWLNEVEFKLKTTENIPGGAEEISEVLDSLENLMRHSEDNPNQIRILAQTLTDGGVMDELINEELETFNSRWRELHEEAVRRQKLLEQSIQSAQETEKSLHLIQESLTFIDKQLAAYIADKVDAAQMPQEAQKIQSDLTSHEISLEEMKKHNQGKEAAQRVLSQIDVAQKKLQDVSMKFRLFQKPANFEQRLQESKMILDEVKMHLPALETKSVEQEVVQSQLNHCVNLYKSLSEVKSEVEMVIKTGRQIVQKKQTENPKELDERVTALKLHYNELGAKVTERKQQLEKCLKLSRKMRKEMNVLTEWLAATDMELTKRSAVEGMPSNLDSEVAWGKATQKEIEKQKVHLKSITEVGEALKTVLGKKETLVEDKLSLLNSNWIAVTSRAEEWLNLLLEYQKHMETFDQNVDHITKWIIQADTLLDESEKKKPQQKEDVLKRLKAELNDIRPKVDSTRDQAANLMANRGDHCRKLVEPQISELNHRFAAISHRIKTGKASIPLKELEQFNSDIQKLLEPLEAEIQQGVNLKEEDFNKDMDLRSQRRKKALEISHQWYQYKRQADDLLKCLDDIEKKLASLPEPRDERKIKEIDRELQKKKEELNAVRRQAEGLSEDGAAMAVEPTQIQLSKRWREIESKFAQFRRLNFAQIHTVREETMMVMTEDMPLEISYVPSTYLTEITHVSQALLEVEQLLNAPDLCAKDFEDLFKQEESLKNIKDSLQQSSGRIDIIHSKKTAALQSATPVERVKLQEALSQLDFQWEKVNKMYKDRQGRFDRSVEKWRRFHYDIKIFNQWLTEAEQFLRKTQIPENWEHAKYKWYLKELQDGIGQRQTVVRTLNATGEEIIQQSSKTDASILQEKLGSLNLRWQEVCKQLSDRKKRLEEQKNILSEFQRDLNEFVLWLEEADNIASIPLEPGKEQQLKEKLEQVKLLVEELPLRQGILKQLNETGGPVLVSAPISPEEQDKLENKLKQTNLQWIKVSRALPEKQGEIEAQIKDLGQLEKKLEDLEEQLNHLLLWLSPIRNQLEIYNQPNQEGPFDVKETEIAVQAKQPDVEEILSKGQHLYKEKPATQPVKRKLEDLSSEWKAVNRLLQELRAKQPDLAPGLTTIGASPTQTVTLVTQPVVTKETAISKLEMPSSLMLEVPALADFNRAWTELTDWLSLLDQVIKSQRVMVGDLEDINEMIIKQKATMQDLEQRRPQLEELITAAQNLKNKTSNQEARTIITDRIERIQNQWDEVQEHLQNRRQQLNEMLKDSTQWLEAKEEAEQVLGQARAKLESWKEGPYTVDAIQKKITETKQLAKDLRQWQTNVDVANDLALKLLRDYSADDTRKVHMITENINASWRSIHKRVSEREAALEETHRLLQQFPLDLEKFLAWLTEAETTANVLQDATRKERLLEDSKGVKELMKQWQDLQGEIEAHTDVYHNLDENSQKILRSLEGSDDAVLLQRRLDNMNFKWSELRKKSLNIRSHLEASSDQWKRLHLSLQELLVWLQLKDDELSRQAPIGGDFPAVQKQNDVHRAFKRELKTKEPVIMSTLETVRIFLTEQPLEGLEKLYQEPRELPPEERAQNVTRLLRKQAEEVNTEWEKLNLHSADWQRKIDETLERLRELQEATDELDLKLRQAEVIKGSWQPVGDLLIDSLQDHLEKVKALRGEIAPLKENVSHVNDLARQLTTLGIQLSPYNLSTLEDLNTRWKLLQVAVEDRVRQLHEAHRDFGPASQHFLSTSVQGPWERAISPNKVPYYINHETQTTCWDHPKMTELYQSLADLNNVRFSAYRTAMKLRRLQKALCLDLLSLSAACDALDQHNLKQNDQPMDILQIINCLTTIYDRLEQEHNNLVNVPLCVDMCLNWLLNVYDTGRTGRIRVLSFKTGIISLCKAHLEDKYRYLFKQVASSTGFCDQRRLGLLLHDSIQIPRQLGEVASFGGSNIEPSVRSCFQFANNKPEIEAALFLDWMRLEPQSMVWLPVLHRVAAAETAKHQAKCNICKECPIIGFRYRSLKHFNYDICQSCFFSGRVAKGHKMHYPMVEYCTPTTSGEDVRDFAKVLKNKFRTKRYFAKHPRMGYLPVQTVLEGDNMETPVTLINFWPVDSAPASSPQLSHDDTHSRIEHYASRLAEMENSNGSYLNDSISPNESIDDEHLLIQHYCQSLNQDSPLSQPRSPAQILISLESEERGELERILADLEEENRNLQAEYDRLKQQHEHKGLSPLPSPPEMMPTSPQSPRDAELIAEAKLLRQHKGRLEARMQILEDHNKQLESQLHRLRQLLEQPQAEAKVNGTTVSSPSTSLQRSDSSQPMLLRVVGSQTSDSMGEEDLLSPPQDTSTGLEEVMEQLNNSFPSSRGHNVGSLFHMADDLGRAMESLVSVMTDEEGAE

SEQ ID NO: 44 - DNA, 13625 bp, Homo sapiens
actttccccctacaggactcagatctgggaggcaattaccttcggagaaaaacgaataggaaaaactgaagtgttactttttttaaagctgctgaagtttgttggtttctcattgtttttaagcctactggagcaataaagtttgaagaacttttaccaggttttttttatcgctgccttgatatacacttttcaaaatgctttggtgggaagaagtagaggactgttatgaaagagaagatgttcaaaagaaaacattcacaaaatgggtaaatgcacaattttctaagtttgggaagcagcatattgagaacctcttcagtgacctacaggatgggaggcgcctcctagacctcctcgaaggcctgacagggcaaaaactgccaaaagaaaaaggatccacaagagttcatgccctgaacaatgtcaacaaggcactgcgggttttgcagaacaataatgttgatttagtgaatattggaagtactgacatcgtagatggaaatcataaactgactcttggtttgatttggaatataatcctccactggcaggtcaaaaatgtaatgaaaaatatcatggctggattgcaacaaaccaacagtgaaaagattctcctgagctgggtccgacaatcaactcgtaattatccacaggttaatgtaatcaacttcaccaccagctggtctgatggcctggctttgaatgctctcatccatagtcataggccagacctatttgactggaatagtgtggtttgccagcagtcagccacacaacgactggaacatgcattcaacatcgccagatatcaattaggcatagagaaactactcgatcctgaagatgttgataccacctatccagataagaagtccatcttaatgtacatcacatcactcttccaagttttgcctcaacaagtgagcattgaagccatccaggaagtggaaatgttgccaaggccacctaaagtgactaaagaagaacattttcagttacatcatcaaatgcactattctcaacagatcacggtcagtctagcacagggatatgagagaacttcttcccctaagcctcgattcaagagctatgcctacacacaggctgcttatgtcaccacctctgaccctacacggagcccatttccttcacagcatttggaagctcctgaagacaagtcatttggcagttcattgatggagagtgaagtaaacctggaccgttatcaaacagctttagaagaagtattatcgtggcttctttctgctgaggacacattgcaagcacaaggagagatttctaatgatgtggaagtggtgaaagaccagtttcatactcatgaggggtacatgatggatttgacagcccatcagggccgggttggtaatattctacaattgggaagtaagctgattggaacaggaaaattatcagaagatgaagaaactgaagtacaagagcagatgaatctcctaaattcaagatgggaatgcctcagggtagctagcatggaaaaacaaagcaatttacatagagttttaatggatctccagaatcagaaactgaaagagttgaatgactggctaacaaaaacagaagaaagaacaaggaaaatggaggaagagcctcttggacctgatcttgaagacctaaaacgccaagtacaacaacataaggtgcttcaagaagatctagaacaagaacaagtcagggtcaattctctcactcacatggtggtggtagttgatgaatctagtggagatcacgcaactgctgctttggaagaacaacttaaggtattgggagatcgatgggcaaacatctgtagatggacagaagaccgctgggttcttttacaagacatccttctcaaatggcaacgtcttactgaagaacagtgcctttttagtgcatggctttcagaaaaagaagatgcagtgaacaagattcacacaactggctttaaagatcaaaatgaaatgttatcaagtcttcaaaaactggccgttttaaaagcggatctagaaaagaaaaagcaatccatgggcaaactgtattcactcaaacaagatcttctttcaacactgaagaataagtcagtgacccagaagacggaagcatggctggataactttgcccggtgttgggataatttagtccaaaaacttgaaaagagtacagcacagatttcacaggctgtcaccaccactcagccatcactaacacagacaactgtaatggaaacagtaactacggtgaccacaagggaacagatcctggtaaagcatgctcaagaggaacttccaccaccacctccccaaaagaagaggcagattactgtggattctgaaattaggaaaaggttggatgttgatataactgaacttcacagctggattactcgctcagaagctgtgttgcagagtcctgaatttgcaatctttcggaaggaaggcaacttctcagacttaaaagaaaaagtcaatgccatagagcgagaaaaagctgagaagttcagaaaactgcaagatgccagcagatcagctcaggccctggtggaacagatggtgaatgagggtgttaatgcagatagcatcaaacaagcctcagaacaactgaacagccggtggatcgaattctgccagttgctaagtgagagacttaactggctggagtatcagaacaacatcatcgctttctataatcagctacaacaattggagcagatgacaactactgctgaaaactggttgaaaatccaacccaccaccccatcagagccaacagcaattaaaagtcagttaaaaatttgtaaggatgaagtcaaccggctatcagatcttcaacctcaaattgaacgattaaaaattcaaagcatagccctgaaagagaaaggacaaggacccatgttcctggatgcagactttgtggcctttacaaatcattttaagcaagtcttttctgatgtgcaggccagagagaaagagctacagacaatttttgacactttgccaccaatgcgctatcaggagaccatgagtgccatcaggacatgggtccagcagtcagaaaccaaactctccatacctcaacttagtgtcaccgactatgaaatcatggagcagagactcggggaattgcaggctttacaaagttctctgcaagagcaacaaagtggcctatactatctcagcaccactgtgaaagagatgtcgaagaaagcgccctctgaaattagccggaaatatcaatcagaatttgaagaaattgagggacgctggaagaagctctcctcccagctggttgagcattgtcaaaagctagaggagcaaatgaataaactccgaaaaattcagaatcacatacaaaccctgaagaaatggatggctgaagttgatgtttttctgaaggaggaatggcctgcccttggggattcagaaattctaaaaaagcagctgaaacagtgcagacttttagtcagtgatattcagacaattcagcccagtctaaacagtgtcaatgaaggtgggcagaagataaagaatgaagcagagccagagtttgcttcgagacttgagacagaactcaaagaacttaacactcagtgggatcacatgtgccaacaggtctatgccagaaaggaggccttgaagggaggtttggagaaaactgtaagcctccagaaagatctatcagagatgcacgaatggatgacacaagctgaagaagagtatcttgagagagattttgaatataaaactccagatgaattacagaaagcagttgaagagatgaagagagctaaagaagaggcccaacaaaaagaagcgaaagtgaaactccttactgagtctgtaaatagtgtcatagctcaagctccacctgtagcacaagaggccttaaaaaaggaacttgaaactctaaccaccaactaccagtggctctgcactaggctgaatgggaaatgcaagactttggaagaagtttgggcatgttggcatgagttattgtcatacttggagaaagcaaacaagtggctaaatgaagtagaatttaaacttaaaaccactgaaaacattcctggcggagctgaggaaatctctgaggtgctagattcacttgaaaatttgatgcgacattcagaggataacccaaatcagattcgcatattggcacagaccctaacagatggcggagtcatggatgagctaatcaatgaggaacttgagacatttaattctcgttggagggaactacatgaagaggctgtaaggaggcaaaagttgcttgaacagagcatccagtctgcccaggagactgaaaaatccttacacttaatccaggagtccctcacattcattgacaagcagttggcagcttatattgcagacaaggtggacgcagctcaaatgcctcaggaagcccagaaaatccaatctgatttgacaagtcatgagatcagtttagaagaaatgaagaaacataatcaggggaaggaggctgcccaaagagtcctgtctcagattgatgttgcacagaaaaaattacaagatgtctccatgaagtttcgattattccagaaaccagccaattttgagcagcgtctacaagaaagtaagatgattttagatgaagtgaagatgcacttgcctgcattggaaacaaagagtgtggaacaggaagtagtacagtcacagctaaatcattgtgtgaacttgtataaaagtctgagtgaagtgaagtctgaagtggaaatggtgataaagactggacgtcagattgtacagaaaaagcagacggaaaatcccaaagaacttgatgaaagagtaacagctttgaaattgcattataatgagctgggagcaaaggtaacagaaagaaagcaacagttggagaaatgcttgaaattgtcccgtaagatgcgaaaggaaatgaatgtcttgacagaatggctggcagctacagatatggaattgacaaagagatcagcagttgaaggaatgcctagtaatttggattctgaagttgcctggggaaaggctactcaaaaagagattgagaaacagaaggtgcacctgaagagtatcacagaggtaggagaggccttgaaaacagttttgggcaagaaggagacgttggtggaagataaactcagtcttctgaatagtaactggatagctgtcacctcccgagcagaagagtggttaaatcttttgttggaataccagaaacacatggaaacttttgaccagaatgtggaccacatcacaaagtggatcattcaggctgacacacttttggatgaatcagagaaaaagaaaccccagcaaaaagaagacgtgcttaagcgtttaaaggcagaactgaatgacatacgcccaaaggtggactctacacgtgaccaagcagcaaacttgatggcaaaccgcggtgaccactgcaggaaattagtagagccccaaatctcagagctcaaccatcgatttgcagccatttcacacagaattaagactggaaaggcctccattcctttgaaggaattggagcagtttaactcagatatacaaaaattgcttgaaccactggaggctgaaattcagcagggggtgaatctgaaagaggaagacttcaataaagatatgaatgaagacaatgagggtactgtaaaagaattgttgcaaagaggagacaacttacaacaaagaatcacagatgagagaaagcgagaggaaataaagataaaacagcagctgttacagacaaaacataatgctctcaaggatttgaggtctcaaagaagaaaaaaggctctagaaatttctcatcagtggtatcagtacaagaggcaggctgatgatctcctgaaatgcttggatgacattgaaaaaaaattagccagcctacctgagcccagagatgaaaggaaaataaaggaaattgatcgggaattgcagaagaagaaagaggagctgaatgcagtgcgtaggcaagctgagggcttgtctgaggatggggccgcaatggcagtggagccaactcagatccagctcagcaagcgctggcgggaaattgagagcaaatttgctcagtttcgaagactcaactttgcacaaattcacactgtccgtgaagaaacgatgatggtgatgactgaagacatgcctttggaaatttcttatgtgccttctacttatttgactgaaatcactcatgtctcacaagccctattagaagtggaacaacttctcaatgctcctgacctctgtgctaaggactttgaagatctctttaagcaagaggagtctctgaagaatataaaagatagtctacaacaaagctcaggtcggattgacattattcatagcaagaagacagcagcattgcaaagtgcaacgcctgtggaaagggtgaagctacaggaagctctctcccagcttgatttccaatgggaaaaagttaacaaaatgtacaaggaccgacaagggcgatttgacagatctgttgagaaatggcggcgttttcattatgatataaagatatttaatcagtggctaacagaagctgaacagtttctcagaaagacacaaattcctgagaattgggaacatgctaaatacaaatggtatcttaaggaactccaggatggcattgggcagcggcaaactgttgtcagaacattgaatgcaactggggaagaaataattcagcaatcctcaaaaacagatgccagtattctacaggaaaaattgggaagcctgaatctgcggtggcaggaggtctgcaaacagctgtcagacagaaaaaagaggctagaagaacaaaagaatatcttgtcagaatttcaaagagatttaaatgaatttgttttatggttggaggaagcagataacattgctagtatcccacttgaacctggaaaagagcagcaactaaaagaaaagcttgagcaagtcaagttactggtggaagagttgcccctgcgccagggaattctcaaacaattaaatgaaactggaggacccgtgcttgtaagtgctcccataagcccagaagagcaagataaacttgaaaataagctcaagcagacaaatctccagtggataaaggtttccagagctttacctgagaaacaaggagaaattgaagctcaaataaaagaccttgggcagcttgaaaaaaagcttgaagaccttgaagagcagttaaatcatctgctgctgtggttatctcctattaggaatcagttggaaatttataaccaaccaaaccaagaaggaccatttgacgttaaggaaactgaaatagcagttcaagctaaacaaccggatgtggaagagattttgtctaaagggcagcatttgtacaaggaaaaaccagccactcagccagtgaagaggaagttagaagatctgagctctgagtggaaggcggtaaaccgtttacttcaagagctgagggcaaagcagcctgacctagctcctggactgaccactattggagcctctcctactcagactgttactctggtgacacaacctgtggttactaaggaaactgccatctccaaactagaaatgccatcttccttgatgttggaggtacctgctctggcagatttcaaccgggcttggacagaacttaccgactggctttctctgcttgatcaagttataaaatcacagagggtgatggtgggtgaccttgaggatatcaacgagatgatcatcaagcagaaggcaacaatgcaggatttggaacagaggcgtccccagttggaagaactcattaccgctgcccaaaatttgaaaaacaagaccagcaatcaagaggctagaacaatcattacggatcgaattgaaagaattcagaatcagtgggatgaagtacaagaacaccttcagaaccggaggcaacagttgaatgaaatgttaaaggattcaacacaatggctggaagctaaggaagaagctgagcaggtcttaggacaggccagagccaagcttgagtcatggaaggagggtccctatacagtagatgcaatccaaaagaaaatcacagaaaccaagcagttggccaaagacctccgccagtggcagacaaatgtagatgtggcaaatgacttggccctgaaacttctccgggattattctgcagatgataccagaaaagtccacatgataacagagaatatcaatgcctcttggagaagcattcataaaagggtgagtgagcgagaggctgctttggaagaaactcatagattactgcaacagttccccctggacctggaaaagtttcttgcctggcttacagaagctgaaacaactgccaatgtcctacaggatgctacccgtaaggaaaggctcctagaagactccaagggagtaaaagagctgatgaaacaatggcaagacctccaaggtgaaattgaagctcacacagatgtttatcacaacctggatgaaaacagccaaaaaatcctgagatccctggaaggttccgatgatgcagtcctgttacaaagacgtttggataacatgaacttcaagtggagtgaacttcggaaaaagtctctcaacattaggtcccatttggaagccagttctgaccagtggaagcgtctgcacctttctctgcaggaacttctggtgtggctacagctgaaagatgatgaattaagccggcaggcacctattggaggcgactttccagcagttcagaagcagaacgatgtacatagggccttcaagagggaattgaaaactaaagaacctgtaatcatgagtactcttgagactgtacgaatatttctgacagagcagcctttggaaggactagagaaactctaccaggagcccagagagctgcctcctgaggagagagcccagaatgtcactcggcttctacgaaagcaggctgaggaggtcaatactgagtgggaaaaattgaacctgcactccgctgactggcagagaaaaatagatgagacccttgaaagactccgggaacttcaagaggccacggatgagctggacctcaagctgcgccaagctgaggtgatcaagggatcctggcagcccgtgggcgatctcctcattgactctctccaagatcacctcgagaaagtcaaggcacttcgaggagaaattgcgcctctgaaagagaacgtgagccacgtcaatgaccttgctcgccagcttaccactttgggcattcagctctcaccgtataacctcagcactctggaagacctgaacaccagatggaagcttctgcaggtggccgtcgaggaccgagtcaggcagctgcatgaagcccacagggactttggtccagcatctcagcactttctttccacgtctgtccagggtccctgggagagagccatctcgccaaacaaagtgccctactatatcaaccacgagactcaaacaacttgctgggaccatcccaaaatgacagagctctaccagtctttagctgacctgaataatgtcagattctcagcttataggactgccatgaaactccgaagactgcagaaggccctttgcttggatctcttgagcctgtcagctgcatgtgatgccttggaccagcacaacctcaagcaaaatgaccagcccatggatatcctgcagattattaattgtttgaccactatttatgaccgcctggagcaagagcacaacaatttggtcaacgtccctctctgcgtggatatgtgtctgaactggctgctgaatgtttatgatacgggacgaacagggaggatccgtgtcctgtcttttaaaactggcatcatttccctgtgtaaagcacatttggaagacaagtacagataccttttcaagcaagtggcaagttcaacaggattttgtgaccagcgcaggctgggcctccttctgcatgattctatccaaattccaagacagttgggtgaagttgcatcctttgggggcagtaacattgagccaagtgtccggagctgcttccaatttgctaataataagccagagatcgaagcggccctcttcctagactggatgagactggaaccccagtccatggtgtggctgcccgtcctgcacagagtggctgctgcagaaactgccaagcatcaggccaaatgtaacatctgcaaagagtgtccaatcattggattcaggtacaggagtctaaagcactttaattatgacatctgccaaagctgctttttttctggtcgagttgcaaaaggccataaaatgcactatcccatggtggaatattgcactccgactacatcaggagaagatgttcgagactttgccaaggtactaaaaaacaaatttcgaaccaaaaggtattttgcgaagcatccccgaatgggctacctgccagtgcagactgtcttagagggggacaacatggaaacgaatctgcaagcagaatatgaccgtctaaagcagcagcacgaacataaaggcctgtccccactgccgtcccctcctgaaatgatgcccacctctccccagagtccccgggatgctgagctcattgctgaggccaagctactgcgtcaacacaaaggccgcctggaagccaggatgcaaatcctggaagaccacaataaacagctggagtcacagttacacaggctaaggcagctgctggagcaaccccaggcagaggccaaagtgaatggcacaacggtgtcctctccttctacctctctacagaggtccgacagcagtcagcctatgctgctccgagtggttggcagtcaaacttcggactccatgggtgaggaagatcttctcagtcctccccaggacacaagcacagggttagaggaggtgatggagcaactcaacaactccttccctagttcaagaggaagaaatacccctggaaagccaatgagagaggacacaatgtaggaagtcttttccacatggcagatgatttgggcagagcgatggagtccttagtatcagtcatgacagatgaagaaggagcagaataaatgttttacaactcctgattcccgcatggtttttataatattcatacaacaaagaggattagacagtaagagtttacaagaaataaatctatatttttgtgaagggtagtggtattatactgtagatttcagtagtttctaagtctgttattgttttgttaacaatggcaggttttacacgtctatgcaattgtacaaaaaagttataagaaaactacatgtaaaatcttgatagctaaataacttgccatttctttatatggaacgcattttgggttgtttaaaaatttataacagttataaagaaagattgtaaactaaagtgtgctttataaaaaaaagttgtttataaaaacccctaaaaacaaaacaaacacacacacacacacatacacacacacacacaaaactttgaggcagcgcattgttttgcatccttttggcgtgatatccatatgaaattcatggctttttctttttttgcatattaaagataagacttcctctaccaccacaccaaatgactactacacactgctcatttgagaactgtcagctgagtggggcaggcttgagttttcatttcatatatctatatgtctataagtatataaatactatagttatatagataaagagatacgaatttctatagactgactttttccattttttaaatgttcatgtcacatcctaatagaaagaaattacttctagtcagtcatccaggcttacctgcttggtctagaatggatttttcccggagccggaagccaggaggaaactacaccacactaaaacattgtctacagctccagatgtttctcattttaaacaactttccactgacaacgaaagtaaagtaaagtattggatttttttaaagggaacatgtgaatgaatacacaggacttattatatcagagtgagtaatcggttggttggttgattgattgattgattgatacattcagcttcctgctgctagcaatgccacgatttagatttaatgatgcttcagtggaaatcaatcagaaggtattctgaccttgtgaacatcagaaggtattttttaactcccaagcagtagcaggacgatgatagggctggagggctatggattcccagcccatccctgtgaaggagtaggccactctttaagtgaaggattggatgattgttcataatacataaagttctctgtaattacaactaaattattatgccctcttctcacagtcaaaaggaactgggtggtttggtttttgttgcttttttagatttattgtcccatgtgggatgagtttttaaatgccacaagacataatttaaaataaataaactttgggaaaaggtgtaaaacagtagccccatcacatttgtgatactgacaggtatcaacccagaagcccatgaactgtgtttccatcctttgcatttctctgcgagtagttccacacaggtttgtaagtaagtaagaaagaaggcaaattgattcaaatgttacaaaaaaacccttcttggtggattagacaggttaaatatataaacaaacaaacaaaaattgctcaaaaaagaggagaaaagctcaagaggaaaagctaaggactggtaggaaaaagctttactctttcatgccattttatttctttttgatttttaaatcattcattcaatagataccaccgtgtgacctataattttgcaaatctgttacctctgacatcaagtgtaattagcttttggagagtgggctgacatcaagtgtaattagcttttggagagtgggttttgtccattattaataattaattaattaacatcaaacacggcttctcatgctatttctacctcactttggttttggggtgttcctgataattgtgcacacctgagttcacagcttcaccacttgtccattgcgttattttctttttcctttataattctttctttttccttcataattttcaaaagaaaacccaaagctctaaggtaacaaattaccaaattacatgaagatttggtttttgtcttgcatttttttcctttatgtgacgctggaccttttctttacccaaggatttttaaaactcagatttaaaacaaggggttactttacatcctactaagaagtttaagtaagtaagtttcattctaaaatcagaggtaaatagagtgcataaataattttgttttaatctttttgtttttcttttagacacattagctctggagtgagtctgtcataatatttgaacaaaaattgagagctttattgctgcattttaagcataattaatttggacattatttcgtgttgtgttctttataaccaccaagtattaaactgtaaatcataatgtaactgaagcataaacatcacatggcatgttttgtcattgttttcaggtactgagttcttacttgagtatcataatatattgtgttttaacaccaacactgtaacatttacgaattatttttttaaacttcagttttactgcattttcacaacatatcagacttcaccaaatatatgccttactattgtattatagtactgctttactgtgtatctcaataaagcacgcagttatgttacaaaaaagta

SEQ ID NO: 45 - protein, 3575 aa, Homo sapiens
MLWWEEVEDCYEREDVQKKTFTKWVNAQFSKFGKQHIENLFSDLQDGRRLLDLLEGLTGQKLPKEKGSTRVHALNNVNKALRVLQNNNVDLVNIGSTDIVDGNHKLTLGLIWNIILHWQVKNVMKNIMAGLQQTNSEKILLSWVRQSTRNYPQVNVINFTTSWSDGLALNALIHSHRPDLFDWNSVVCQQSATQRLEHAFNIARYQLGIEKLLDPEDVDTTYPDKKSILMYITSLFQVLPQQVSIEAIQEVEMLPRPPKVTKEEHFQLHHQMHYSQQITVSLAQGYERTSSPKPRFKSYAYTQAAYVTTSDPTRSPFPSQHLEAPEDKSFGSSLMESEVNLDRYQTALEEVLSWLLSAEDTLQAQGEISNDVEVVKDQFHTHEGYMMDLTAHQGRVGNILQLGSKLIGTGKLSEDEETEVQEQMNLLNSRWECLRVASMEKQSNLHRVLMDLQNQKLKELNDWLTKTEERTRKMEEEPLGPDLEDLKRQVQQHKVLQEDLEQEQVRVNSLTHMVVVVDESSGDHATAALEEQLKVLGDRWANICRWTEDRWVLLQDILLKWQRLTEEQCLFSAWLSEKEDAVNKIHTTGFKDQNEMLSSLQKLAVLKADLEKKKQSMGKLYSLKQDLLSTLKNKSVTQKTEAWLDNFARCWDNLVQKLEKSTAQISQAVTTTQPSLTQTTVMETVTTVTTREQILVKHAQEELPPPPPQKKRQITVDSEIRKRLDVDITELHSWITRSEAVLQSPEFAIFRKEGNFSDLKEKVNAIEREKAEKFRKLQDASRSAQALVEQMVNEGVNADSIKQASEQLNSRWIEFCQLLSERLNWLEYQNNIIAFYNQLQQLEQMTTTAENWLKIQPTTPSEPTAIKSQLKICKDEVNRLSDLQPQIERLKIQSIALKEKGQGPMFLDADFVAFTNHFKQVFSDVQAREKELQTIFDTLPPMRYQETMSAIRTWVQQSETKLSIPQLSVTDYEIMEQRLGELQALQSSLQEQQSGLYYLSTTVKEMSKKAPSEISRKYQSEFEEIEGRWKKLSSQLVEHCQKLEEQMNKLRKIQNHIQTLKKWMAEVDVFLKEEWPALGDSEILKKQLKQCRLLVSDIQTIQPSLNSVNEGGQKIKNEAEPEFASRLETELKELNTQWDHMCQQVYARKEALKGGLEKTVSLQKDLSEMHEWMTQAEEEYLERDFEYKTPDELQKAVEEMKRAKEEAQQKEAKVKLLTESVNSVIAQAPPVAQEALKKELETLTTNYQWLCTRLNGKCKTLEEVWACWHELLSYLEKANKWLNEVEFKLKTTENIPGGAEEISEVLDSLENLMRHSEDNPNQIRILAQTLTDGGVMDELINEELETFNSRWRELHEEAVRRQKLLEQSIQSAQETEKSLHLIQESLTFIDKQLAAYIADKVDAAQMPQEAQKIQSDLTSHEISLEEMKKHNQGKEAAQRVLSQIDVAQKKLQDVSMKFRLFQKPANFEQRLQESKMILDEVKMHLPALETKSVEQEVVQSQLNHCVNLYKSLSEVKSEVEMVIKTGRQIVQKKQTENPKELDERVTALKLHYNELGAKVTERKQQLEKCLKLSRKMRKEMNVLTEWLAATDMELTKRSAVEGMPSNLDSEVAWGKATQKEIEKQKVHLKSITEVGEALKTVLGKKETLVEDKLSLLNSNWIAVTSRAEEWLNLLLEYQKHMETFDQNVDHITKWIIQADTLLDESEKKKPQQKEDVLKRLKAELNDIRPKVDSTRDQAANLMANRGDHCRKLVEPQISELNHRFAAISHRIKTGKASIPLKELEQFNSDIQKLLEPLEAEIQQGVNLKEEDFNKDMNEDNEGTVKELLQRGDNLQQRITDERKREEIKIKQQLLQTKHNALKDLRSQRRKKALEISHQWYQYKRQADDLLKCLDDIEKKLASLPEPRDERKIKEIDRELQKKKEELNAVRRQAEGLSEDGAAMAVEPTQIQLSKRWREIESKFAQFRRLNFAQIHTVREETMMVMTEDMPLEISYVPSTYLTEITHVSQALLEVEQLLNAPDLCAKDFEDLFKQEESLKNIKDSLQQSSGRIDIIHSKKTAALQSATPVERVKLQEALSQLDFQWEKVNKMYKDRQGRFDRSVEKWRRFHYDIKIFNQWLTEAEQFLRKTQIPENWEHAKYKWYLKELQDGIGQRQTVVRTLNATGEEIIQQSSKTDASILQEKLGSLNLRWQEVCKQLSDRKKRLEEQKNILSEFQRDLNEFVLWLEEADNIASIPLEPGKEQQLKEKLEQVKLLVEELPLRQGILKQLNETGGPVLVSAPISPEEQDKLENKLKQTNLQWIKVSRALPEKQGEIEAQIKDLGQLEKKLEDLEEQLNHLLLWLSPIRNQLEIYNQPNQEGPFDVKETEIAVQAKQPDVEEILSKGQHLYKEKPATQPVKRKLEDLSSEWKAVNRLLQELRAKQPDLAPGLTTIGASPTQTVTLVTQPVVTKETAISKLEMPSSLMLEVPALADFNRAWTELTDWLSLLDQVIKSQRVMVGDLEDINEMIIKQKATMQDLEQRRPQLEELITAAQNLKNKTSNQEARTIITDRIERIQNQWDEVQEHLQNRRQQLNEMLKDSTQWLEAKEEAEQVLGQARAKLESWKEGPYTVDAIQKKITETKQLAKDLRQWQTNVDVANDLALKLLRDYSADDTRKVHMITENINASWRSIHKRVSEREAALEETHRLLQQFPLDLEKFLAWLTEAETTANVLQDATRKERLLEDSKGVKELMKQWQDLQGEIEAHTDVYHNLDENSQKILRSLEGSDDAVLLQRRLDNMNFKWSELRKKSLNIRSHLEASSDQWKRLHLSLQELLVWLQLKDDELSRQAPIGGDFPAVQKQNDVHRAFKRELKTKEPVIMSTLETVRIFLTEQPLEGLEKLYQEPRELPPEERAQNVTRLLRKQAEEVNTEWEKLNLHSADWQRKIDETLERLRELQEATDELDLKLRQAEVIKGSWQPVGDLLIDSLQDHLEKVKALRGEIAPLKENVSHVNDLARQLTTLGIQLSPYNLSTLEDLNTRWKLLQVAVEDRVRQLHEAHRDFGPASQHFLSTSVQGPWERAISPNKVPYYINHETQTTCWDHPKMTELYQSLADLNNVRFSAYRTAMKLRRLQKALCLDLLSLSAACDALDQHNLKQNDQPMDILQIINCLTTIYDRLEQEHNNLVNVPLCVDMCLNWLLNVYDTGRTGRIRVLSFKTGIISLCKAHLEDKYRYLFKQVASSTGFCDQRRLGLLLHDSIQIPRQLGEVASFGGSNIEPSVRSCFQFANNKPEIEAALFLDWMRLEPQSMVWLPVLHRVAAAETAKHQAKCNICKECPIIGFRYRSLKHFNYDICQSCFFSGRVAKGHKMHYPMVEYCTPTTSGEDVRDFAKVLKNKFRTKRYFAKHPRMGYLPVQTVLEGDNMETNLQAEYDRLKQQHEHKGLSPLPSPPEMMPTSPQSPRDAELIAEAKLLRQHKGRLEARMQILEDHNKQLESQLHRLRQLLEQPQAEAKVNGTTVSSPSTSLQRSDSSQPMLLRVVGSQTSDSMGEEDLLSPPQDTSTGLEEVMEQLNNSFPSSRGRNTPGKPMREDTM

SEQ ID NO: 46 - DNA, 13916 bp, Homo sapiens
actttccccctacaggactcagatctgggaggcaattaccttcggagaaaaacgaataggaaaaactgaagtgttactttttttaaagctgctgaagtttgttggtttctcattgtttttaagcctactggagcaataaagtttgaagaacttttaccaggttttttttatcgctgccttgatatacacttttcaaaatgctttggtgggaagaagtagaggactgttatgaaagagaagatgttcaaaagaaaacattcacaaaatgggtaaatgcacaattttctaagtttgggaagcagcatattgagaacctcttcagtgacctacaggatgggaggcgcctcctagacctcctcgaaggcctgacagggcaaaaactgccaaaagaaaaaggatccacaagagttcatgccctgaacaatgtcaacaaggcactgcgggttttgcagaacaataatgttgatttagtgaatattggaagtactgacatcgtagatggaaatcataaactgactcttggtttgatttggaatataatcctccactggcaggtcaaaaatgtaatgaaaaatatcatggctggattgcaacaaaccaacagtgaaaagattctcctgagctgggtccgacaatcaactcgtaattatccacaggttaatgtaatcaacttcaccaccagctggtctgatggcctggctttgaatgctctcatccatagtcataggccagacctatttgactggaatagtgtggtttgccagcagtcagccacacaacgactggaacatgcattcaacatcgccagatatcaattaggcatagagaaactactcgatcctgaagatgttgataccacctatccagataagaagtccatcttaatgtacatcacatcactcttccaagttttgcctcaacaagtgagcattgaagccatccaggaagtggaaatgttgccaaggccacctaaagtgactaaagaagaacattttcagttacatcatcaaatgcactattctcaacagatcacggtcagtctagcacagggatatgagagaacttcttcccctaagcctcgattcaagagctatgcctacacacaggctgcttatgtcaccacctctgaccctacacggagcccatttccttcacagcatttggaagctcctgaagacaagtcatttggcagttcattgatggagagtgaagtaaacctggaccgttatcaaacagctttagaagaagtattatcgtggcttctttctgctgaggacacattgcaagcacaaggagagatttctaatgatgtggaagtggtgaaagaccagtttcatactcatgaggggtacatgatggatttgacagcccatcagggccgggttggtaatattctacaattgggaagtaagctgattggaacaggaaaattatcagaagatgaagaaactgaagtacaagagcagatgaatctcctaaattcaagatgggaatgcctcagggtagctagcatggaaaaacaaagcaatttacatagagttttaatggatctccagaatcagaaactgaaagagttgaatgactggctaacaaaaacagaagaaagaacaaggaaaatggaggaagagcctcttggacctgatcttgaagacctaaaacgccaagtacaacaacataaggtgcttcaagaagatctagaacaagaacaagtcagggtcaattctctcactcacatggtggtggtagttgatgaatctagtggagatcacgcaactgctgctttggaagaacaacttaaggtattgggagatcgatgggcaaacatctgtagatggacagaagaccgctgggttcttttacaagacatccttctcaaatggcaacgtcttactgaagaacagtgcctttttagtgcatggctttcagaaaaagaagatgcagtgaacaagattcacacaactggctttaaagatcaaaatgaaatgttatcaagtcttcaaaaactggccgttttaaaagcggatctagaaaagaaaaagcaatccatgggcaaactgtattcactcaaacaagatcttctttcaacactgaagaataagtcagtgacccagaagacggaagcatggctggataactttgcccggtgttgggataatttagtccaaaaacttgaaaagagtacagcacagatttcacaggctgtcaccaccactcagccatcactaacacagacaactgtaatggaaacagtaactacggtgaccacaagggaacagatcctggtaaagcatgctcaagaggaacttccaccaccacctccccaaaagaagaggcagattactgtggattctgaaattaggaaaaggttggatgttgatataactgaacttcacagctggattactcgctcagaagctgtgttgcagagtcctgaatttgcaatctttcggaaggaaggcaacttctcagacttaaaagaaaaagtcaatgccatagagcgagaaaaagctgagaagttcagaaaactgcaagatgccagcagatcagctcaggccctggtggaacagatggtgaatgagggtgttaatgcagatagcatcaaacaagcctcagaacaactgaacagccggtggatcgaattctgccagttgctaagtgagagacttaactggctggagtatcagaacaacatcatcgctttctataatcagctacaacaattggagcagatgacaactactgctgaaaactggttgaaaatccaacccaccaccccatcagagccaacagcaattaaaagtcagttaaaaatttgtaaggatgaagtcaaccggctatcagatcttcaacctcaaattgaacgattaaaaattcaaagcatagccctgaaagagaaaggacaaggacccatgttcctggatgcagactttgtggcctttacaaatcattttaagcaagtcttttctgatgtgcaggccagagagaaagagctacagacaatttttgacactttgccaccaatgcgctatcaggagaccatgagtgccatcaggacatgggtccagcagtcagaaaccaaactctccatacctcaacttagtgtcaccgactatgaaatcatggagcagagactcggggaattgcaggctttacaaagttctctgcaagagcaacaaagtggcctatactatctcagcaccactgtgaaagagatgtcgaagaaagcgccctctgaaattagccggaaatatcaatcagaatttgaagaaattgagggacgctggaagaagctctcctcccagctggttgagcattgtcaaaagctagaggagcaaatgaataaactccgaaaaattcagaatcacatacaaaccctgaagaaatggatggctgaagttgatgtttttctgaaggaggaatggcctgcccttggggattcagaaattctaaaaaagcagctgaaacagtgcagacttttagtcagtgatattcagacaattcagcccagtctaaacagtgtcaatgaaggtgggcagaagataaagaatgaagcagagccagagtttgcttcgagacttgagacagaactcaaagaacttaacactcagtgggatcacatgtgccaacaggtctatgccagaaaggaggccttgaagggaggtttggagaaaactgtaagcctccagaaagatctatcagagatgcacgaatggatgacacaagctgaagaagagtatcttgagagagattttgaatataaaactccagatgaattacagaaagcagttgaagagatgaagagagctaaagaagaggcccaacaaaaagaagcgaaagtgaaactccttactgagtctgtaaatagtgtcatagctcaagctccacctgtagcacaagaggccttaaaaaaggaacttgaaactctaaccaccaactaccagtggctctgcactaggctgaatgggaaatgcaagactttggaagaagtttgggcatgttggcatgagttattgtcatacttggagaaagcaaacaagtggctaaatgaagtagaatttaaacttaaaaccactgaaaacattcctggcggagctgaggaaatctctgaggtgctagattcacttgaaaatttgatgcgacattcagaggataacccaaatcagattcgcatattggcacagaccctaacagatggcggagtcatggatgagctaatcaatgaggaacttgagacatttaattctcgttggagggaactacatgaagaggctgtaaggaggcaaaagttgcttgaacagagcatccagtctgcccaggagactgaaaaatccttacacttaatccaggagtccctcacattcattgacaagcagttggcagcttatattgcagacaaggtggacgcagctcaaatgcctcaggaagcccagaaaatccaatctgatttgacaagtcatgagatcagtttagaagaaatgaagaaacataatcaggggaaggaggctgcccaaagagtcctgtctcagattgatgttgcacagaaaaaattacaagatgtctccatgaagtttcgattattccagaaaccagccaattttgagcagcgtctacaagaaagtaagatgattttagatgaagtgaagatgcacttgcctgcattggaaacaaagagtgtggaacaggaagtagtacagtcacagctaaatcattgtgtgaacttgtataaaagtctgagtgaagtgaagtctgaagtggaaatggtgataaagactggacgtcagattgtacagaaaaagcagacggaaaatcccaaagaacttgatgaaagagtaacagctttgaaattgcattataatgagctgggagcaaaggtaacagaaagaaagcaacagttggagaaatgcttgaaattgtcccgtaagatgcgaaaggaaatgaatgtcttgacagaatggctggcagctacagatatggaattgacaaagagatcagcagttgaaggaatgcctagtaatttggattctgaagttgcctggggaaaggctactcaaaaagagattgagaaacagaaggtgcacctgaagagtatcacagaggtaggagaggccttgaaaacagttttgggcaagaaggagacgttggtggaagataaactcagtcttctgaatagtaactggatagctgtcacctcccgagcagaagagtggttaaatcttttgttggaataccagaaacacatggaaacttttgaccagaatgtggaccacatcacaaagtggatcattcaggctgacacacttttggatgaatcagagaaaaagaaaccccagcaaaaagaagacgtgcttaagcgtttaaaggcagaactgaatgacatacgcccaaaggtggactctacacgtgaccaagcagcaaacttgatggcaaaccgcggtgaccactgcaggaaattagtagagccccaaatctcagagctcaaccatcgatttgcagccatttcacacagaattaagactggaaaggcctccattcctttgaaggaattggagcagtttaactcagatatacaaaaattgcttgaaccactggaggctgaaattcagcagggggtgaatctgaaagaggaagacttcaataaagatatgaatgaagacaatgagggtactgtaaaagaattgttgcaaagaggagacaacttacaacaaagaatcacagatgagagaaagcgagaggaaataaagataaaacagcagctgttacagacaaaacataatgctctcaaggatttgaggtctcaaagaagaaaaaaggctctagaaatttctcatcagtggtatcagtacaagaggcaggctgatgatctcctgaaatgcttggatgacattgaaaaaaaattagccagcctacctgagcccagagatgaaaggaaaataaaggaaattgatcgggaattgcagaagaagaaagaggagctgaatgcagtgcgtaggcaagctgagggcttgtctgaggatggggccgcaatggcagtggagccaactcagatccagctcagcaagcgctggcgggaaattgagagcaaatttgctcagtttcgaagactcaactttgcacaaattcacactgtccgtgaagaaacgatgatggtgatgactgaagacatgcctttggaaatttcttatgtgccttctacttatttgactgaaatcactcatgtctcacaagccctattagaagtggaacaacttctcaatgctcctgacctctgtgctaaggactttgaagatctctttaagcaagaggagtctctgaagaatataaaagatagtctacaacaaagctcaggtcggattgacattattcatagcaagaagacagcagcattgcaaagtgcaacgcctgtggaaagggtgaagctacaggaagctctctcccagcttgatttccaatgggaaaaagttaacaaaatgtacaaggaccgacaagggcgatttgacagatctgttgagaaatggcggcgttttcattatgatataaagatatttaatcagtggctaacagaagctgaacagtttctcagaaagacacaaattcctgagaattgggaacatgctaaatacaaatggtatcttaaggaactccaggatggcattgggcagcggcaaactgttgtcagaacattgaatgcaactggggaagaaataattcagcaatcctcaaaaacagatgccagtattctacaggaaaaattgggaagcctgaatctgcggtggcaggaggtctgcaaacagctgtcagacagaaaaaagaggctagaagaacaaaagaatatcttgtcagaatttcaaagagatttaaatgaatttgttttatggttggaggaagcagataacattgctagtatcccacttgaacctggaaaagagcagcaactaaaagaaaagcttgagcaagtcaagttactggtggaagagttgcccctgcgccagggaattctcaaacaattaaatgaaactggaggacccgtgcttgtaagtgctcccataagcccagaagagcaagataaacttgaaaataagctcaagcagacaaatctccagtggataaaggtttccagagctttacctgagaaacaaggagaaattgaagctcaaataaaagaccttgggcagcttgaaaaaaagcttgaagaccttgaagagcagttaaatcatctgctgctgtggttatctcctattaggaatcagttggaaatttataaccaaccaaaccaagaaggaccatttgacgttaaggaaactgaaatagcagttcaagctaaacaaccggatgtggaagagattttgtctaaagggcagcatttgtacaaggaaaaaccagccactcagccagtgaagaggaagttagaagatctgagctctgagtggaaggcggtaaaccgtttacttcaagagctgagggcaaagcagcctgacctagctcctggactgaccactattggagcctctcctactcagactgttactctggtgacacaacctgtggttactaaggaaactgccatctccaaactagaaatgccatcttccttgatgttggaggtacctgctctggcagatttcaaccgggcttggacagaacttaccgactggctttctctgcttgatcaagttataaaatcacagagggtgatggtgggtgaccttgaggatatcaacgagatgatcatcaagcagaaggcaacaatgcaggatttggaacagaggcgtccccagttggaagaactcattaccgctgcccaaaatttgaaaaacaagaccagcaatcaagaggctagaacaatcattacggatcgaattgaaagaattcagaatcagtgggatgaagtacaagaacaccttcagaaccggaggcaacagttgaatgaaatgttaaaggattcaacacaatggctggaagctaaggaagaagctgagcaggtcttaggacaggccagagccaagcttgagtcatggaaggagggtccctatacagtagatgcaatccaaaagaaaatcacagaaaccaagcagttggccaaagacctccgccagtggcagacaaatgtagatgtggcaaatgacttggccctgaaacttctccgggattattctgcagatgataccagaaaagtccacatgataacagagaatatcaatgcctcttggagaagcattcataaaagggtgagtgagcgagaggctgctttggaagaaactcatagattactgcaacagttccccctggacctggaaaagtttcttgcctggcttacagaagctgaaacaactgccaatgtcctacaggatgctacccgtaaggaaaggctcctagaagactccaagggagtaaaagagctgatgaaacaatggcaagacctccaaggtgaaattgaagctcacacagatgtttatcacaacctggatgaaaacagccaaaaaatcctgagatccctggaaggttccgatgatgcagtcctgttacaaagacgtttggataacatgaacttcaagtggagtgaacttcggaaaaagtctctcaacattaggtcccatttggaagccagttctgaccagtggaagcgtctgcacctttctctgcaggaacttctggtgtggctacagctgaaagatgatgaattaagccggcaggcacctattggaggcgactttccagcagttcagaagcagaacgatgtacatagggccttcaagagggaattgaaaactaaagaacctgtaatcatgagtactcttgagactgtacgaatatttctgacagagcagcctttggaaggactagagaaactctaccaggagcccagagagctgcctcctgaggagagagcccagaatgtcactcggcttctacgaaagcaggctgaggaggtcaatactgagtgggaaaaattgaacctgcactccgctgactggcagagaaaaatagatgagacccttgaaagactccgggaacttcaagaggccacggatgagctggacctcaagctgcgccaagctgaggtgatcaagggatcctggcagcccgtgggcgatctcctcattgactctctccaagatcacctcgagaaagtcaaggcacttcgaggagaaattgcgcctctgaaagagaacgtgagccacgtcaatgaccttgctcgccagcttaccactttgggcattcagctctcaccgtataacctcagcactctggaagacctgaacaccagatggaagcttctgcaggtggccgtcgaggaccgagtcaggcagctgcatgaagcccacagggactttggtccagcatctcagcactttctttccacgtctgtccagggtccctgggagagagccatctcgccaaacaaagtgccctactatatcaaccacgagactcaaacaacttgctgggaccatcccaaaatgacagagctctaccagtctttagctgacctgaataatgtcagattctcagcttataggactgccatgaaactccgaagactgcagaaggccctttgcttggatctcttgagcctgtcagctgcatgtgatgccttggaccagcacaacctcaagcaaaatgaccagcccatggatatcctgcagattattaattgtttgaccactatttatgaccgcctggagcaagagcacaacaatttggtcaacgtccctctctgcgtggatatgtgtctgaactggctgctgaatgtttatgatacgggacgaacagggaggatccgtgtcctgtcttttaaaactggcatcatttccctgtgtaaagcacatttggaagacaagtacagataccttttcaagcaagtggcaagttcaacaggattttgtgaccagcgcaggctgggcctccttctgcatgattctatccaaattccaagacagttgggtgaagttgcatcctttgggggcagtaacattgagccaagtgtccggagctgcttccaatttgctaataataagccagagatcgaagcggccctcttcctagactggatgagactggaaccccagtccatggtgtggctgcccgtcctgcacagagtggctgctgcagaaactgccaagcatcaggccaaatgtaacatctgcaaagagtgtccaatcattggattcaggtacaggagtctaaagcactttaattatgacatctgccaaagctgctttttttctggtcgagttgcaaaaggccataaaatgcactatcccatggtggaatattgcactccgactacatcaggagaagatgttcgagactttgccaaggtactaaaaaacaaatttcgaaccaaaaggtattttgcgaagcatccccgaatgggctacctgccagtgcagactgtcttagagggggacaacatggaaacgcctgcctcgtcccctcagctttcacacgatgatactcattcacgcattgaacattatgctagcaggctagcagaaatggaaaacagcaatggatcttatctaaatgatagcatctctcctaatgagagcatagatgatgaacatttgttaatccagcattactgccaaagtttgaaccaggactcccccctgagccagcctcgtagtcctgcccagatcttgatttccttagagagtgaggaaagaggggagctagagagaatcctagcagatcttgaggaagaaaacaggaatctgcaagcagaatatgaccgtctaaagcagcagcacgaacataaaggcctgtccccactgccgtcccctcctgaaatgatgcccacctctccccagagtccccgggatgctgagctcattgctgaggccaagctactgcgtcaacacaaaggccgcctggaagccaggatgcaaatcctggaagaccacaataaacagctggagtcacagttacacaggctaaggcagctgctggagcaaccccaggcagaggccaaagtgaatggcacaacggtgtcctctccttctacctctctacagaggtccgacagcagtcagcctatgctgctccgagtggttggcagtcaaacttcggactccatgggtgaggaagatcttctcagtcctccccaggacacaagcacagggttagaggaggtgatggagcaactcaacaactccttccctagttcaagaggaagaaatacccctggaaagccaatgagagaggacacaatgtaggaagtcttttccacatggcagatgatttgggcagagcgatggagtccttagtatcagtcatgacagatgaagaaggagcagaataaatgttttacaactcctgattcccgcatggtttttataatattcatacaacaaagaggattagacagtaagagtttacaagaaataaatctatatttttgtgaagggtagtggtattatactgtagatttcagtagtttctaagtctgttattgttttgttaacaatggcaggttttacacgtctatgcaattgtacaaaaaagttataagaaaactacatgtaaaatcttgatagctaaataacttgccatttctttatatggaacgcattttgggttgtttaaaaatttataacagttataaagaaagattgtaaactaaagtgtgctttataaaaaaaagttgtttataaaaacccctaaaaacaaaacaaacacacacacacacacatacacacacacacacaaaactttgaggcagcgcattgttttgcatccttttggcgtgatatccatatgaaattcatggctttttctttttttgcatattaaagataagacttcctctaccaccacaccaaatgactactacacactgctcatttgagaactgtcagctgagtggggcaggcttgagttttcatttcatatatctatatgtctataagtatataaatactatagttatatagataaagagatacgaatttctatagactgactttttccattttttaaatgttcatgtcacatcctaatagaaagaaattacttctagtcagtcatccaggcttacctgcttggtctagaatggatttttcccggagccggaagccaggaggaaactacaccacactaaaacattgtctacagctccagatgtttctcattttaaacaactttccactgacaacgaaagtaaagtaaagtattggatttttttaaagggaacatgtgaatgaatacacaggacttattatatcagagtgagtaatcggttggttggttgattgattgattgattgatacattcagcttcctgctgctagcaatgccacgatttagatttaatgatgcttcagtggaaatcaatcagaaggtattctgaccttgtgaacatcagaaggtattttttaactcccaagcagtagcaggacgatgatagggctggagggctatggattcccagcccatccctgtgaaggagtaggccactctttaagtgaaggattggatgattgttcataatacataaagttctctgtaattacaactaaattattatgccctcttctcacagtcaaaaggaactgggtggtttggtttttgttgcttttttagatttattgtcccatgtgggatgagtttttaaatgccacaagacataatttaaaataaataaactttgggaaaaggtgtaaaacagtagccccatcacatttgtgatactgacaggtatcaacccagaagcccatgaactgtgtttccatcctttgcatttctctgcgagtagttccacacaggtttgtaagtaagtaagaaagaaggcaaattgattcaaatgttacaaaaaaacccttcttggtggattagacaggttaaatatataaacaaacaaacaaaaattgctcaaaaaagaggagaaaagctcaagaggaaaagctaaggactggtaggaaaaagctttactctttcatgccattttatttctttttgatttttaaatcattcattcaatagataccaccgtgtgacctataattttgcaaatctgttacctctgacatcaagtgtaattagcttttggagagtgggctgacatcaagtgtaattagcttttggagagtgggttttgtccattattaataattaattaattaacatcaaacacggcttctcatgctatttctacctcactttggttttggggtgttcctgataattgtgcacacctgagttcacagcttcaccacttgtccattgcgttattttctttttcctttataattctttctttttccttcataattttcaaaagaaaacccaaagctctaaggtaacaaattaccaaattacatgaagatttggtttttgtcttgcatttttttcctttatgtgacgctggaccttttctttacccaaggatttttaaaactcagatttaaaacaaggggttactttacatcctactaagaagtttaagtaagtaagtttcattctaaaatcagaggtaaatagagtgcataaataattttgttttaatctttttgtttttcttttagacacattagctctggagtgagtctgtcataatatttgaacaaaaattgagagctttattgctgcattttaagcataattaatttggacattatttcgtgttgtgttctttataaccaccaagtattaaactgtaaatcataatgtaactgaagcataaacatcacatggcatgttttgtcattgttttcaggtactgagttcttacttgagtatcataatatattgtgttttaacaccaacactgtaacatttacgaattatttttttaaacttcagttttactgcattttcacaacatatcagacttcaccaaatatatgccttactattgtattatagtactgctttactgtgtatctcaataaagcacgcagttatgttacaaaaaagta

SEQ ID NO: 47 - protein, 3672 aa, Homo sapiens
MLWWEEVEDCYEREDVQKKTFTKWVNAQFSKFGKQHIENLFSDLQDGRRLLDLLEGLTGQKLPKEKGSTRVHALNNVNKALRVLQNNNVDLVNIGSTDIVDGNHKLTLGLIWNIILHWQVKNVMKNIMAGLQQTNSEKILLSWVRQSTRNYPQVNVINFTTSWSDGLALNALIHSHRPDLFDWNSVVCQQSATQRLEHAFNIARYQLGIEKLLDPEDVDTTYPDKKSILMYITSLFQVLPQQVSIEAIQEVEMLPRPPKVTKEEHFQLHHQMHYSQQITVSLAQGYERTSSPKPRFKSYAYTQAAYVTTSDPTRSPFPSQHLEAPEDKSFGSSLMESEVNLDRYQTALEEVLSWLLSAEDTLQAQGEISNDVEVVKDQFHTHEGYMMDLTAHQGRVGNILQLGSKLIGTGKLSEDEETEVQEQMNLLNSRWECLRVASMEKQSNLHRVLMDLQNQKLKELNDWLTKTEERTRKMEEEPLGPDLEDLKRQVQQHKVLQEDLEQEQVRVNSLTHMVVVVDESSGDHATAALEEQLKVLGDRWANICRWTEDRWVLLQDILLKWQRLTEEQCLFSAWLSEKEDAVNKIHTTGFKDQNEMLSSLQKLAVLKADLEKKKQSMGKLYSLKQDLLSTLKNKSVTQKTEAWLDNFARCWDNLVQKLEKSTAQISQAVTTTQPSLTQTTVMETVTTVTTREQILVKHAQEELPPPPPQKKRQITVDSEIRKRLDVDITELHSWITRSEAVLQSPEFAIFRKEGNFSDLKEKVNAIEREKAEKFRKLQDASRSAQALVEQMVNEGVNADSIKQASEQLNSRWIEFCQLLSERLNWLEYQNNIIAFYNQLQQLEQMTTTAENWLKIQPTTPSEPTAIKSQLKICKDEVNRLSDLQPQIERLKIQSIALKEKGQGPMFLDADFVAFTNHFKQVFSDVQAREKELQTIFDTLPPMRYQETMSAIRTWVQQSETKLSIPQLSVTDYEIMEQRLGELQALQSSLQEQQSGLYYLSTTVKEMSKKAPSEISRKYQSEFEEIEGRWKKLSSQLVEHCQKLEEQMNKLRKIQNHIQTLKKWMAEVDVFLKEEWPALGDSEILKKQLKQCRLLVSDIQTIQPSLNSVNEGGQKIKNEAEPEFASRLETELKELNTQWDHMCQQVYARKEALKGGLEKTVSLQKDLSEMHEWMTQAEEEYLERDFEYKTPDELQKAVEEMKRAKEEAQQKEAKVKLLTESVNSVIAQAPPVAQEALKKELETLTTNYQWLCTRLNGKCKTLEEVWACWHELLSYLEKANKWLNEVEFKLKTTENIPGGAEEISEVLDSLENLMRHSEDNPNQIRILAQTLTDGGVMDELINEELETFNSRWRELHEEAVRRQKLLEQSIQSAQETEKSLHLIQESLTFIDKQLAAYIADKVDAAQMPQEAQKIQSDLTSHEISLEEMKKHNQGKEAAQRVLSQIDVAQKKLQDVSMKFRLFQKPANFEQRLQESKMILDEVKMHLPALETKSVEQEVVQSQLNHCVNLYKSLSEVKSEVEMVIKTGRQIVQKKQTENPKELDERVTALKLHYNELGAKVTERKQQLEKCLKLSRKMRKEMNVLTEWLAATDMELTKRSAVEGMPSNLDSEVAWGKATQKEIEKQKVHLKSITEVGEALKTVLGKKETLVEDKLSLLNSNWIAVTSRAEEWLNLLLEYQKHMETFDQNVDHITKWIIQADTLLDESEKKKPQQKEDVLKRLKAELNDIRPKVDSTRDQAANLMANRGDHCRKLVEPQISELNHRFAAISHRIKTGKASIPLKELEQFNSDIQKLLEPLEAEIQQGVNLKEEDFNKDMNEDNEGTVKELLQRGDNLQQRITDERKREEIKIKQQLLQTKHNALKDLRSQRRKKALEISHQWYQYKRQADDLLKCLDDIEKKLASLPEPRDERKIKEIDRELQKKKEELNAVRRQAEGLSEDGAAMAVEPTQIQLSKRWREIESKFAQFRRLNFAQIHTVREETMMVMTEDMPLEISYVPSTYLTEITHVSQALLEVEQLLNAPDLCAKDFEDLFKQEESLKNIKDSLQQSSGRIDIIHSKKTAALQSATPVERVKLQEALSQLDFQWEKVNKMYKDRQGRFDRSVEKWRRFHYDIKIFNQWLTEAEQFLRKTQIPENWEHAKYKWYLKELQDGIGQRQTVVRTLNATGEEIIQQSSKTDASILQEKLGSLNLRWQEVCKQLSDRKKRLEEQKNILSEFQRDLNEFVLWLEEADNIASIPLEPGKEQQLKEKLEQVKLLVEELPLRQGILKQLNETGGPVLVSAPISPEEQDKLENKLKQTNLQWIKVSRALPEKQGEIEAQIKDLGQLEKKLEDLEEQLNHLLLWLSPIRNQLEIYNQPNQEGPFDVKETEIAVQAKQPDVEEILSKGQHLYKEKPATQPVKRKLEDLSSEWKAVNRLLQELRAKQPDLAPGLTTIGASPTQTVTLVTQPVVTKETAISKLEMPSSLMLEVPALADFNRAWTELTDWLSLLDQVIKSQRVMVGDLEDINEMIIKQKATMQDLEQRRPQLEELITAAQNLKNKTSNQEARTIITDRIERIQNQWDEVQEHLQNRRQQLNEMLKDSTQWLEAKEEAEQVLGQARAKLESWKEGPYTVDAIQKKITETKQLAKDLRQWQTNVDVANDLALKLLRDYSADDTRKVHMITENINASWRSIHKRVSEREAALEETHRLLQQFPLDLEKFLAWLTEAETTANVLQDATRKERLLEDSKGVKELMKQWQDLQGEIEAHTDVYHNLDENSQKILRSLEGSDDAVLLQRRLDNMNFKWSELRKKSLNIRSHLEASSDQWKRLHLSLQELLVWLQLKDDELSRQAPIGGDFPAVQKQNDVHRAFKRELKTKEPVIMSTLETVRIFLTEQPLEGLEKLYQEPRELPPEERAQNVTRLLRKQAEEVNTEWEKLNLHSADWQRKIDETLERLRELQEATDELDLKLRQAEVIKGSWQPVGDLLIDSLQDHLEKVKALRGEIAPLKENVSHVNDLARQLTTLGIQLSPYNLSTLEDLNTRWKLLQVAVEDRVRQLHEAHRDFGPASQHFLSTSVQGPWERAISPNKVPYYINHETQTTCWDHPKMTELYQSLADLNNVRFSAYRTAMKLRRLQKALCLDLLSLSAACDALDQHNLKQNDQPMDILQIINCLTTIYDRLEQEHNNLVNVPLCVDMCLNWLLNVYDTGRTGRIRVLSFKTGIISLCKAHLEDKYRYLFKQVASSTGFCDQRRLGLLLHDSIQIPRQLGEVASFGGSNIEPSVRSCFQFANNKPEIEAALFLDWMRLEPQSMVWLPVLHRVAAAETAKHQAKCNICKECPIIGFRYRSLKHFNYDICQSCFFSGRVAKGHKMHYPMVEYCTPTTSGEDVRDFAKVLKNKFRTKRYFAKHPRMGYLPVQTVLEGDNMETPASSPQLSHDDTHSRIEHYASRLAEMENSNGSYLNDSISPNESIDDEHLLIQHYCQSLNQDSPLSQPRSPAQILISLESEERGELERILADLEEENRNLQAEYDRLKQQHEHKGLSPLPSPPEMMPTSPQSPRDAELIAEAKLLRQHKGRLEARMQILEDHNKQLESQLHRLRQLLEQPQAEAKVNGTTVSSPSTSLQRSDSSQPMLLRVVGSQTSDSMGEEDLLSPPQDTSTGLEEVMEQLNNSFPSSRGRNTPGKPMREDTM

SEQ ID NO: 48 - DNA, 13923 bp, Homo sapiens
actttccccctacaggactcagatctgggaggcaattaccttcggagaaaaacgaataggaaaaactgaagtgttactttttttaaagctgctgaagtttgttggtttctcattgtttttaagcctactggagcaataaagtttgaagaacttttaccaggttttttttatcgctgccttgatatacacttttcaaaatgctttggtgggaagaagtagaggactgttatgaaagagaagatgttcaaaagaaaacattcacaaaatgggtaaatgcacaattttctaagtttgggaagcagcatattgagaacctcttcagtgacctacaggatgggaggcgcctcctagacctcctcgaaggcctgacagggcaaaaactgccaaaagaaaaaggatccacaagagttcatgccctgaacaatgtcaacaaggcactgcgggttttgcagaacaataatgttgatttagtgaatattggaagtactgacatcgtagatggaaatcataaactgactcttggtttgatttggaatataatcctccactggcaggtcaaaaatgtaatgaaaaatatcatggctggattgcaacaaaccaacagtgaaaagattctcctgagctgggtccgacaatcaactcgtaattatccacaggttaatgtaatcaacttcaccaccagctggtctgatggcctggctttgaatgctctcatccatagtcataggccagacctatttgactggaatagtgtggtttgccagcagtcagccacacaacgactggaacatgcattcaacatcgccagatatcaattaggcatagagaaactactcgatcctgaagatgttgataccacctatccagataagaagtccatcttaatgtacatcacatcactcttccaagttttgcctcaacaagtgagcattgaagccatccaggaagtggaaatgttgccaaggccacctaaagtgactaaagaagaacattttcagttacatcatcaaatgcactattctcaacagatcacggtcagtctagcacagggatatgagagaacttcttcccctaagcctcgattcaagagctatgcctacacacaggctgcttatgtcaccacctctgaccctacacggagcccatttccttcacagcatttggaagctcctgaagacaagtcatttggcagttcattgatggagagtgaagtaaacctggaccgttatcaaacagctttagaagaagtattatcgtggcttctttctgctgaggacacattgcaagcacaaggagagatttctaatgatgtggaagtggtgaaagaccagtttcatactcatgaggggtacatgatggatttgacagcccatcagggccgggttggtaatattctacaattgggaagtaagctgattggaacaggaaaattatcagaagatgaagaaactgaagtacaagagcagatgaatctcctaaattcaagatgggaatgcctcagggtagctagcatggaaaaacaaagcaatttacatagagttttaatggatctccagaatcagaaactgaaagagttgaatgactggctaacaaaaacagaagaaagaacaaggaaaatggaggaagagcctcttggacctgatcttgaagacctaaaacgccaagtacaacaacataaggtgcttcaagaagatctagaacaagaacaagtcagggtcaattctctcactcacatggtggtggtagttgatgaatctagtggagatcacgcaactgctgctttggaagaacaacttaaggtattgggagatcgatgggcaaacatctgtagatggacagaagaccgctgggttcttttacaagacatccttctcaaatggcaacgtcttactgaagaacagtgcctttttagtgcatggctttcagaaaaagaagatgcagtgaacaagattcacacaactggctttaaagatcaaaatgaaatgttatcaagtcttcaaaaactggccgttttaaaagcggatctagaaaagaaaaagcaatccatgggcaaactgtattcactcaaacaagatcttctttcaacactgaagaataagtcagtgacccagaagacggaagcatggctggataactttgcccggtgttgggataatttagtccaaaaacttgaaaagagtacagcacagatttcacaggctgtcaccaccactcagccatcactaacacagacaactgtaatggaaacagtaactacggtgaccacaagggaacagatcctggtaaagcatgctcaagaggaacttccaccaccacctccccaaaagaagaggcagattactgtggattctgaaattaggaaaaggttggatgttgatataactgaacttcacagctggattactcgctcagaagctgtgttgcagagtcctgaatttgcaatctttcggaaggaaggcaacttctcagacttaaaagaaaaagtcaatgccatagagcgagaaaaagctgagaagttcagaaaactgcaagatgccagcagatcagctcaggccctggtggaacagatggtgaatgagggtgttaatgcagatagcatcaaacaagcctcagaacaactgaacagccggtggatcgaattctgccagttgctaagtgagagacttaactggctggagtatcagaacaacatcatcgctttctataatcagctacaacaattggagcagatgacaactactgctgaaaactggttgaaaatccaacccaccaccccatcagagccaacagcaattaaaagtcagttaaaaatttgtaaggatgaagtcaaccggctatcagatcttcaacctcaaattgaacgattaaaaattcaaagcatagccctgaaagagaaaggacaaggacccatgttcctggatgcagactttgtggcctttacaaatcattttaagcaagtcttttctgatgtgcaggccagagagaaagagctacagacaatttttgacactttgccaccaatgcgctatcaggagaccatgagtgccatcaggacatgggtccagcagtcagaaaccaaactctccatacctcaacttagtgtcaccgactatgaaatcatggagcagagactcggggaattgcaggctttacaaagttctctgcaagagcaacaaagtggcctatactatctcagcaccactgtgaaagagatgtcgaagaaagcgccctctgaaattagccggaaatatcaatcagaatttgaagaaattgagggacgctggaagaagctctcctcccagctggttgagcattgtcaaaagctagaggagcaaatgaataaactccgaaaaattcagaatcacatacaaaccctgaagaaatggatggctgaagttgatgtttttctgaaggaggaatggcctgcccttggggattcagaaattctaaaaaagcagctgaaacagtgcagacttttagtcagtgatattcagacaattcagcccagtctaaacagtgtcaatgaaggtgggcagaagataaagaatgaagcagagccagagtttgcttcgagacttgagacagaactcaaagaacttaacactcagtgggatcacatgtgccaacaggtctatgccagaaaggaggccttgaagggaggtttggagaaaactgtaagcctccagaaagatctatcagagatgcacgaatggatgacacaagctgaagaagagtatcttgagagagattttgaatataaaactccagatgaattacagaaagcagttgaagagatgaagagagctaaagaagaggcccaacaaaaagaagcgaaagtgaaactccttactgagtctgtaaatagtgtcatagctcaagctccacctgtagcacaagaggccttaaaaaaggaacttgaaactctaaccaccaactaccagtggctctgcactaggctgaatgggaaatgcaagactttggaagaagtttgggcatgttggcatgagttattgtcatacttggagaaagcaaacaagtggctaaatgaagtagaatttaaacttaaaaccactgaaaacattcctggcggagctgaggaaatctctgaggtgctagattcacttgaaaatttgatgcgacattcagaggataacccaaatcagattcgcatattggcacagaccctaacagatggcggagtcatggatgagctaatcaatgaggaacttgagacatttaattctcgttggagggaactacatgaagaggctgtaaggaggcaaaagttgcttgaacagagcatccagtctgcccaggagactgaaaaatccttacacttaatccaggagtccctcacattcattgacaagcagttggcagcttatattgcagacaaggtggacgcagctcaaatgcctcaggaagcccagaaaatccaatctgatttgacaagtcatgagatcagtttagaagaaatgaagaaacataatcaggggaaggaggctgcccaaagagtcctgtctcagattgatgttgcacagaaaaaattacaagatgtctccatgaagtttcgattattccagaaaccagccaattttgagcagcgtctacaagaaagtaagatgattttagatgaagtgaagatgcacttgcctgcattggaaacaaagagtgtggaacaggaagtagtacagtcacagctaaatcattgtgtgaacttgtataaaagtctgagtgaagtgaagtctgaagtggaaatggtgataaagactggacgtcagattgtacagaaaaagcagacggaaaatcccaaagaacttgatgaaagagtaacagctttgaaattgcattataatgagctgggagcaaaggtaacagaaagaaagcaacagttggagaaatgcttgaaattgtcccgtaagatgcgaaaggaaatgaatgtcttgacagaatggctggcagctacagatatggaattgacaaagagatcagcagttgaaggaatgcctagtaatttggattctgaagttgcctggggaaaggctactcaaaaagagattgagaaacagaaggtgcacctgaagagtatcacagaggtaggagaggccttgaaaacagttttgggcaagaaggagacgttggtggaagataaactcagtcttctgaatagtaactggatagctgtcacctcccgagcagaagagtggttaaatcttttgttggaataccagaaacacatggaaacttttgaccagaatgtggaccacatcacaaagtggatcattcaggctgacacacttttggatgaatcagagaaaaagaaaccccagcaaaaagaagacgtgcttaagcgtttaaaggcagaactgaatgacatacgcccaaaggtggactctacacgtgaccaagcagcaaacttgatggcaaaccgcggtgaccactgcaggaaattagtagagccccaaatctcagagctcaaccatcgatttgcagccatttcacacagaattaagactggaaaggcctccattcctttgaaggaattggagcagtttaactcagatatacaaaaattgcttgaaccactggaggctgaaattcagcagggggtgaatctgaaagaggaagacttcaataaagatatgaatgaagacaatgagggtactgtaaaagaattgttgcaaagaggagacaacttacaacaaagaatcacagatgagagaaagcgagaggaaataaagataaaacagcagctgttacagacaaaacataatgctctcaaggatttgaggtctcaaagaagaaaaaaggctctagaaatttctcatcagtggtatcagtacaagaggcaggctgatgatctcctgaaatgcttggatgacattgaaaaaaaattagccagcctacctgagcccagagatgaaaggaaaataaaggaaattgatcgggaattgcagaagaagaaagaggagctgaatgcagtgcgtaggcaagctgagggcttgtctgaggatggggccgcaatggcagtggagccaactcagatccagctcagcaagcgctggcgggaaattgagagcaaatttgctcagtttcgaagactcaactttgcacaaattcacactgtccgtgaagaaacgatgatggtgatgactgaagacatgcctttggaaatttcttatgtgccttctacttatttgactgaaatcactcatgtctcacaagccctattagaagtggaacaacttctcaatgctcctgacctctgtgctaaggactttgaagatctctttaagcaagaggagtctctgaagaatataaaagatagtctacaacaaagctcaggtcggattgacattattcatagcaagaagacagcagcattgcaaagtgcaacgcctgtggaaagggtgaagctacaggaagctctctcccagcttgatttccaatgggaaaaagttaacaaaatgtacaaggaccgacaagggcgatttgacagatctgttgagaaatggcggcgttttcattatgatataaagatatttaatcagtggctaacagaagctgaacagtttctcagaaagacacaaattcctgagaattgggaacatgctaaatacaaatggtatcttaaggaactccaggatggcattgggcagcggcaaactgttgtcagaacattgaatgcaactggggaagaaataattcagcaatcctcaaaaacagatgccagtattctacaggaaaaattgggaagcctgaatctgcggtggcaggaggtctgcaaacagctgtcagacagaaaaaagaggctagaagaacaaaagaatatcttgtcagaatttcaaagagatttaaatgaatttgttttatggttggaggaagcagataacattgctagtatcccacttgaacctggaaaagagcagcaactaaaagaaaagcttgagcaagtcaagttactggtggaagagttgcccctgcgccagggaattctcaaacaattaaatgaaactggaggacccgtgcttgtaagtgctcccataagcccagaagagcaagataaacttgaaaataagctcaagcagacaaatctccagtggataaaggtttccagagctttacctgagaaacaaggagaaattgaagctcaaataaaagaccttgggcagcttgaaaaaaagcttgaagaccttgaagagcagttaaatcatctgctgctgtggttatctcctattaggaatcagttggaaatttataaccaaccaaaccaagaaggaccatttgacgttaaggaaactgaaatagcagttcaagctaaacaaccggatgtggaagagattttgtctaaagggcagcatttgtacaaggaaaaaccagccactcagccagtgaagaggaagttagaagatctgagctctgagtggaaggcggtaaaccgtttacttcaagagctgagggcaaagcagcctgacctagctcctggactgaccactattggagcctctcctactcagactgttactctggtgacacaacctgtggttactaaggaaactgccatctccaaactagaaatgccatcttccttgatgttggaggtacctgctctggcagatttcaaccgggcttggacagaacttaccgactggctttctctgcttgatcaagttataaaatcacagagggtgatggtgggtgaccttgaggatatcaacgagatgatcatcaagcagaaggcaacaatgcaggatttggaacagaggcgtccccagttggaagaactcattaccgctgcccaaaatttgaaaaacaagaccagcaatcaagaggctagaacaatcattacggatcgaattgaaagaattcagaatcagtgggatgaagtacaagaacaccttcagaaccggaggcaacagttgaatgaaatgttaaaggattcaacacaatggctggaagctaaggaagaagctgagcaggtcttaggacaggccagagccaagcttgagtcatggaaggagggtccctatacagtagatgcaatccaaaagaaaatcacagaaaccaagcagttggccaaagacctccgccagtggcagacaaatgtagatgtggcaaatgacttggccctgaaacttctccgggattattctgcagatgataccagaaaagtccacatgataacagagaatatcaatgcctcttggagaagcattcataaaagggtgagtgagcgagaggctgctttggaagaaactcatagattactgcaacagttccccctggacctggaaaagtttcttgcctggcttacagaagctgaaacaactgccaatgtcctacaggatgctacccgtaaggaaaggctcctagaagactccaagggagtaaaagagctgatgaaacaatggcaagacctccaaggtgaaattgaagctcacacagatgtttatcacaacctggatgaaaacagccaaaaaatcctgagatccctggaaggttccgatgatgcagtcctgttacaaagacgtttggataacatgaacttcaagtggagtgaacttcggaaaaagtctctcaacattaggtcccatttggaagccagttctgaccagtggaagcgtctgcacctttctctgcaggaacttctggtgtggctacagctgaaagatgatgaattaagccggcaggcacctattggaggcgactttccagcagttcagaagcagaacgatgtacatagggccttcaagagggaattgaaaactaaagaacctgtaatcatgagtactcttgagactgtacgaatatttctgacagagcagcctttggaaggactagagaaactctaccaggagcccagagagctgcctcctgaggagagagcccagaatgtcactcggcttctacgaaagcaggctgaggaggtcaatactgagtgggaaaaattgaacctgcactccgctgactggcagagaaaaatagatgagacccttgaaagactccgggaacttcaagaggccacggatgagctggacctcaagctgcgccaagctgaggtgatcaagggatcctggcagcccgtgggcgatctcctcattgactctctccaagatcacctcgagaaagtcaaggcacttcgaggagaaattgcgcctctgaaagagaacgtgagccacgtcaatgaccttgctcgccagcttaccactttgggcattcagctctcaccgtataacctcagcactctggaagacctgaacaccagatggaagcttctgcaggtggccgtcgaggaccgagtcaggcagctgcatgaagcccacagggactttggtccagcatctcagcactttctttccacgtctgtccagggtccctgggagagagccatctcgccaaacaaagtgccctactatatcaaccacgagactcaaacaacttgctgggaccatcccaaaatgacagagctctaccagtctttagctgacctgaataatgtcagattctcagcttataggactgccatgaaactccgaagactgcagaaggccctttgcttggatctcttgagcctgtcagctgcatgtgatgccttggaccagcacaacctcaagcaaaatgaccagcccatggatatcctgcagattattaattgtttgaccactatttatgaccgcctggagcaagagcacaacaatttggtcaacgtccctctctgcgtggatatgtgtctgaactggctgctgaatgtttatgatacgggacgaacagggaggatccgtgtcctgtcttttaaaactggcatcatttccctgtgtaaagcacatttggaagacaagtacagataccttttcaagcaagtggcaagttcaacaggattttgtgaccagcgcaggctgggcctccttctgcatgattctatccaaattccaagacagttgggtgaagttgcatcctttgggggcagtaacattgagccaagtgtccggagctgcttccaatttgctaataataagccagagatcgaagcggccctcttcctagactggatgagactggaaccccagtccatggtgtggctgcccgtcctgcacagagtggctgctgcagaaactgccaagcatcaggccaaatgtaacatctgcaaagagtgtccaatcattggattcaggtacaggagtctaaagcactttaattatgacatctgccaaagctgctttttttctggtcgagttgcaaaaggccataaaatgcactatcccatggtggaatattgcactccgactacatcaggagaagatgttcgagactttgccaaggtactaaaaaacaaatttcgaaccaaaaggtattttgcgaagcatccccgaatgggctacctgccagtgcagactgtcttagagggggacaacatggaaactcccgttactctgatcaacttctggccagtagattctgcgcctgcctcgtcccctcagctttcacacgatgatactcattcacgcattgaacattatgctagcaggctagcagaaatggaaaacagcaatggatcttatctaaatgatagcatctctcctaatgagagcatagatgatgaacatttgttaatccagcattactgccaaagtttgaaccaggactcccccctgagccagcctcgtagtcctgcccagatcttgatttccttagagagtgaggaaagaggggagctagagagaatcctagcagatcttgaggaagaaaacaggaatctgcaagcagaatatgaccgtctaaagcagcagcacgaacataaaggcctgtccccactgccgtcccctcctgaaatgatgcccacctctccccagagtccccgggatgctgagctcattgctgaggccaagctactgcgtcaacacaaaggccgcctggaagccaggatgcaaatcctggaagaccacaataaacagctggagtcacagttacacaggctaaggcagctgctggagcaaccccaggcagaggccaaagtgaatggcacaacggtgtcctctccttctacctctctacagaggtccgacagcagtcagcctatgctgctccgagtggttggcagtcaaacttcggactccatgggtgaggaagatcttctcagtcctccccaggacacaagcacagggttagaggaggtgatggagcaactcaacaactccttccctagttcaagaggacacaatgtaggaagtcttttccacatggcagatgatttgggcagagcgatggagtccttagtatcagtcatgacagatgaagaaggagcagaataaatgttttacaactcctgattcccgcatggtttttataatattcatacaacaaagaggattagacagtaagagtttacaagaaataaatctatatttttgtgaagggtagtggtattatactgtagatttcagtagtttctaagtctgttattgttttgttaacaatggcaggttttacacgtctatgcaattgtacaaaaaagttataagaaaactacatgtaaaatcttgatagctaaataacttgccatttctttatatggaacgcattttgggttgtttaaaaatttataacagttataaagaaagattgtaaactaaagtgtgctttataaaaaaaagttgtttataaaaacccctaaaaacaaaacaaacacacacacacacacatacacacacacacacaaaactttgaggcagcgcattgttttgcatccttttggcgtgatatccatatgaaattcatggctttttctttttttgcatattaaagataagacttcctctaccaccacaccaaatgactactacacactgctcatttgagaactgtcagctgagtggggcaggcttgagttttcatttcatatatctatatgtctataagtatataaatactatagttatatagataaagagatacgaatttctatagactgactttttccattttttaaatgttcatgtcacatcctaatagaaagaaattacttctagtcagtcatccaggcttacctgcttggtctagaatggatttttcccggagccggaagccaggaggaaactacaccacactaaaacattgtctacagctccagatgtttctcattttaaacaactttccactgacaacgaaagtaaagtaaagtattggatttttttaaagggaacatgtgaatgaatacacaggacttattatatcagagtgagtaatcggttggttggttgattgattgattgattgatacattcagcttcctgctgctagcaatgccacgatttagatttaatgatgcttcagtggaaatcaatcagaaggtattctgaccttgtgaacatcagaaggtattttttaactcccaagcagtagcaggacgatgatagggctggagggctatggattcccagcccatccctgtgaaggagtaggccactctttaagtgaaggattggatgattgttcataatacataaagttctctgtaattacaactaaattattatgccctcttctcacagtcaaaaggaactgggtggtttggtttttgttgcttttttagatttattgtcccatgtgggatgagtttttaaatgccacaagacataatttaaaataaataaactttgggaaaaggtgtaaaacagtagccccatcacatttgtgatactgacaggtatcaacccagaagcccatgaactgtgtttccatcctttgcatttctctgcgagtagttccacacaggtttgtaagtaagtaagaaagaaggcaaattgattcaaatgttacaaaaaaacccttcttggtggattagacaggttaaatatataaacaaacaaacaaaaattgctcaaaaaagaggagaaaagctcaagaggaaaagctaaggactggtaggaaaaagctttactctttcatgccattttatttctttttgatttttaaatcattcattcaatagataccaccgtgtgacctataattttgcaaatctgttacctctgacatcaagtgtaattagcttttggagagtgggctgacatcaagtgtaattagcttttggagagtgggttttgtccattattaataattaattaattaacatcaaacacggcttctcatgctatttctacctcactttggttttggggtgttcctgataattgtgcacacctgagttcacagcttcaccacttgtccattgcgttattttctttttcctttataattctttctttttccttcataattttcaaaagaaaacccaaagctctaaggtaacaaattaccaaattacatgaagatttggtttttgtcttgcatttttttcctttatgtgacgctggaccttttctttacccaaggatttttaaaactcagatttaaaacaaggggttactttacatcctactaagaagtttaagtaagtaagtttcattctaaaatcagaggtaaatagagtgcataaataattttgttttaatctttttgtttttcttttagacacattagctctggagtgagtctgtcataatatttgaacaaaaattgagagctttattgctgcattttaagcataattaatttggacattatttcgtgttgtgttctttataaccaccaagtattaaactgtaaatcataatgtaactgaagcataaacatcacatggcatgttttgtcattgttttcaggtactgagttcttacttgagtatcataatatattgtgttttaacaccaacactgtaacatttacgaattatttttttaaacttcagttttactgcattttcacaacatatcagacttcaccaaatatatgccttactattgtattatagtactgctttactgtgtatctcaataaagcacgcagttatgttacaaaaaagta

SEQ ID NO: 49 - protein, 3703 aa, Homo sapiens
MLWWEEVEDCYEREDVQKKTFTKWVNAQFSKFGKQHIENLFSDLQDGRRLLDLLEGLTGQKLPKEKGSTRVHALNNVNKALRVLQNNNVDLVNIGSTDIVDGNHKLTLGLIWNIILHWQVKNVMKNIMAGLQQTNSEKILLSWVRQSTRNYPQVNVINFTTSWSDGLALNALIHSHRPDLFDWNSVVCQQSATQRLEHAFNIARYQLGIEKLLDPEDVDTTYPDKKSILMYITSLFQVLPQQVSIEAIQEVEMLPRPPKVTKEEHFQLHHQMHYSQQITVSLAQGYERTSSPKPRFKSYAYTQAAYVTTSDPTRSPFPSQHLEAPEDKSFGSSLMESEVNLDRYQTALEEVLSWLLSAEDTLQAQGEISNDVEVVKDQFHTHEGYMMDLTAHQGRVGNILQLGSKLIGTGKLSEDEETEVQEQMNLLNSRWECLRVASMEKQSNLHRVLMDLQNQKLKELNDWLTKTEERTRKMEEEPLGPDLEDLKRQVQQHKVLQEDLEQEQVRVNSLTHMVVVVDESSGDHATAALEEQLKVLGDRWANICRWTEDRWVLLQDILLKWQRLTEEQCLFSAWLSEKEDAVNKIHTTGFKDQNEMLSSLQKLAVLKADLEKKKQSMGKLYSLKQDLLSTLKNKSVTQKTEAWLDNFARCWDNLVQKLEKSTAQISQAVTTTQPSLTQTTVMETVTTVTTREQILVKHAQEELPPPPPQKKRQITVDSEIRKRLDVDITELHSWITRSEAVLQSPEFAIFRKEGNFSDLKEKVNAIEREKAEKFRKLQDASRSAQALVEQMVNEGVNADSIKQASEQLNSRWIEFCQLLSERLNWLEYQNNIIAFYNQLQQLEQMTTTAENWLKIQPTTPSEPTAIKSQLKICKDEVNRLSDLQPQIERLKIQSIALKEKGQGPMFLDADFVAFTNHFKQVFSDVQAREKELQTIFDTLPPMRYQETMSAIRTWVQQSETKLSIPQLSVTDYEIMEQRLGELQALQSSLQEQQSGLYYLSTTVKEMSKKAPSEISRKYQSEFEEIEGRWKKLSSQLVEHCQKLEEQMNKLRKIQNHIQTLKKWMAEVDVFLKEEWPALGDSEILKKQLKQCRLLVSDIQTIQPSLNSVNEGGQKIKNEAEPEFASRLETELKELNTQWDHMCQQVYARKEALKGGLEKTVSLQKDLSEMHEWMTQAEEEYLERDFEYKTPDELQKAVEEMKRAKEEAQQKEAKVKLLTESVNSVIAQAPPVAQEALKKELETLTTNYQWLCTRLNGKCKTLEEVWACWHELLSYLEKANKWLNEVEFKLKTTENIPGGAEEISEVLDSLENLMRHSEDNPNQIRILAQTLTDGGVMDELINEELETFNSRWRELHEEAVRRQKLLEQSIQSAQETEKSLHLIQESLTFIDKQLAAYIADKVDAAQMPQEAQKIQSDLTSHEISLEEMKKHNQGKEAAQRVLSQIDVAQKKLQDVSMKFRLFQKPANFEQRLQESKMILDEVKMHLPALETKSVEQEVVQSQLNHCVNLYKSLSEVKSEVEMVIKTGRQIVQKKQTENPKELDERVTALKLHYNELGAKVTERKQQLEKCLKLSRKMRKEMNVLTEWLAATDMELTKRSAVEGMPSNLDSEVAWGKATQKEIEKQKVHLKSITEVGEALKTVLGKKETLVEDKLSLLNSNWIAVTSRAEEWLNLLLEYQKHMETFDQNVDHITKWIIQADTLLDESEKKKPQQKEDVLKRLKAELNDIRPKVDSTRDQAANLMANRGDHCRKLVEPQISELNHRFAAISHRIKTGKASIPLKELEQFNSDIQKLLEPLEAEIQQGVNLKEEDFNKDMNEDNEGTVKELLQRGDNLQQRITDERKREEIKIKQQLLQTKHNALKDLRSQRRKKALEISHQWYQYKRQADDLLKCLDDIEKKLASLPEPRDERKIKEIDRELQKKKEELNAVRRQAEGLSEDGAAMAVEPTQIQLSKRWREIESKFAQFRRLNFAQIHTVREETMMVMTEDMPLEISYVPSTYLTEITHVSQALLEVEQLLNAPDLCAKDFEDLFKQEESLKNIKDSLQQSSGRIDIIHSKKTAALQSATPVERVKLQEALSQLDFQWEKVNKMYKDRQGRFDRSVEKWRRFHYDIKIFNQWLTEAEQFLRKTQIPENWEHAKYKWYLKELQDGIGQRQTVVRTLNATGEEIIQQSSKTDASILQEKLGSLNLRWQEVCKQLSDRKKRLEEQKNILSEFQRDLNEFVLWLEEADNIASIPLEPGKEQQLKEKLEQVKLLVEELPLRQGILKQLNETGGPVLVSAPISPEEQDKLENKLKQTNLQWIKVSRALPEKQGEIEAQIKDLGQLEKKLEDLEEQLNHLLLWLSPIRNQLEIYNQPNQEGPFDVKETEIAVQAKQPDVEEILSKGQHLYKEKPATQPVKRKLEDLSSEWKAVNRLLQELRAKQPDLAPGLTTIGASPTQTVTLVTQPVVTKETAISKLEMPSSLMLEVPALADFNRAWTELTDWLSLLDQVIKSQRVMVGDLEDINEMIIKQKATMQDLEQRRPQLEELITAAQNLKNKTSNQEARTIITDRIERIQNQWDEVQEHLQNRRQQLNEMLKDSTQWLEAKEEAEQVLGQARAKLESWKEGPYTVDAIQKKITETKQLAKDLRQWQTNVDVANDLALKLLRDYSADDTRKVHMITENINASWRSIHKRVSEREAALEETHRLLQQFPLDLEKFLAWLTEAETTANVLQDATRKERLLEDSKGVKELMKQWQDLQGEIEAHTDVYHNLDENSQKILRSLEGSDDAVLLQRRLDNMNFKWSELRKKSLNIRSHLEASSDQWKRLHLSLQELLVWLQLKDDELSRQAPIGGDFPAVQKQNDVHRAFKRELKTKEPVIMSTLETVRIFLTEQPLEGLEKLYQEPRELPPEERAQNVTRLLRKQAEEVNTEWEKLNLHSADWQRKIDETLERLRELQEATDELDLKLRQAEVIKGSWQPVGDLLIDSLQDHLEKVKALRGEIAPLKENVSHVNDLARQLTTLGIQLSPYNLSTLEDLNTRWKLLQVAVEDRVRQLHEAHRDFGPASQHFLSTSVQGPWERAISPNKVPYYINHETQTTCWDHPKMTELYQSLADLNNVRFSAYRTAMKLRRLQKALCLDLLSLSAACDALDQHNLKQNDQPMDILQIINCLTTIYDRLEQEHNNLVNVPLCVDMCLNWLLNVYDTGRTGRIRVLSFKTGIISLCKAHLEDKYRYLFKQVASSTGFCDQRRLGLLLHDSIQIPRQLGEVASFGGSNIEPSVRSCFQFANNKPEIEAALFLDWMRLEPQSMVWLPVLHRVAAAETAKHQAKCNICKECPIIGFRYRSLKHFNYDICQSCFFSGRVAKGHKMHYPMVEYCTPTTSGEDVRDFAKVLKNKFRTKRYFAKHPRMGYLPVQTVLEGDNMETPVTLINFWPVDSAPASSPQLSHDDTHSRIEHYASRLAEMENSNGSYLNDSISPNESIDDEHLLIQHYCQSLNQDSPLSQPRSPAQILISLESEERGELERILADLEEENRNLQAEYDRLKQQHEHKGLSPLPSPPEMMPTSPQSPRDAELIAEAKLLRQHKGRLEARMQILEDHNKQLESQLHRLRQLLEQPQAEAKVNGTTVSSPSTSLQRSDSSQPMLLRVVGSQTSDSMGEEDLLSPPQDTSTGLEEVMEQLNNSFPSSRGHNVGSLFHMADDLGRAMESLVSVMTDEEGAE

SEQ ID NO: 50 - DNA, 8499 bp, Homo sapiens
tttcatcagagcatcttcacacatcagtgttcactctctatagatttatttgcatattgtctaaatatgtttttttctgttattattttacactttttattttgcttcattctctgttgagttcctcaaacctttaaaaaggaaataaataacttattcacttaccctctaaattatattctatgtggacggtccctaataaataatgagttatcactccaaattgtttcaaatcccaagacaccagaggaatttagaagaaagaaaatgttagaccaatttcaatatttacttaattagaatatctaaaaccaagcattcaaaggataactgaaataatatttgggttattgagcgaggatgacagtcatgcctttcatatttgtaaacttcaaaggatgacaataaagggacaacagcctttgaaattttgagagaagtatttgctgcttgcaagtcggttgatgtggttagctaactgccctgggccctgtattggttttgctcaataggaaattgatcgggaattgcagaagaagaaagaggagctgaatgcagtgcgtaggcaagctgagggcttgtctgaggatggggccgcaatggcagtggagccaactcagatccagctcagcaagcgctggcgggaaattgagagcaaatttgctcagtttcgaagactcaactttgcacaaattcacactgtccgtgaagaaacgatgatggtgatgactgaagacatgcctttggaaatttcttatgtgccttctacttatttgactgaaatcactcatgtctcacaagccctattagaagtggaacaacttctcaatgctcctgacctctgtgctaaggactttgaagatctctttaagcaagaggagtctctgaagaatataaaagatagtctacaacaaagctcaggtcggattgacattattcatagcaagaagacagcagcattgcaaagtgcaacgcctgtggaaagggtgaagctacaggaagctctctcccagcttgatttccaatgggaaaaagttaacaaaatgtacaaggaccgacaagggcgatttgacagatctgttgagaaatggcggcgttttcattatgatataaagatatttaatcagtggctaacagaagctgaacagtttctcagaaagacacaaattcctgagaattgggaacatgctaaatacaaatggtatcttaaggaactccaggatggcattgggcagcggcaaactgttgtcagaacattgaatgcaactggggaagaaataattcagcaatcctcaaaaacagatgccagtattctacaggaaaaattgggaagcctgaatctgcggtggcaggaggtctgcaaacagctgtcagacagaaaaaagaggctagaagaacaaaagaatatcttgtcagaatttcaaagagatttaaatgaatttgttttatggttggaggaagcagataacattgctagtatcccacttgaacctggaaaagagcagcaactaaaagaaaagcttgagcaagtcaagttactggtggaagagttgcccctgcgccagggaattctcaaacaattaaatgaaactggaggacccgtgcttgtaagtgctcccataagcccagaagagcaagataaacttgaaaataagctcaagcagacaaatctccagtggataaaggtttccagagctttacctgagaaacaaggagaaattgaagctcaaataaaagaccttgggcagcttgaaaaaaagcttgaagaccttgaagagcagttaaatcatctgctgctgtggttatctcctattaggaatcagttggaaatttataaccaaccaaaccaagaaggaccatttgacgttaaggaaactgaaatagcagttcaagctaaacaaccggatgtggaagagattttgtctaaagggcagcatttgtacaaggaaaaaccagccactcagccagtgaagaggaagttagaagatctgagctctgagtggaaggcggtaaaccgtttacttcaagagctgagggcaaagcagcctgacctagctcctggactgaccactattggagcctctcctactcagactgttactctggtgacacaacctgtggttactaaggaaactgccatctccaaactagaaatgccatcttccttgatgttggaggtacctgctctggcagatttcaaccgggcttggacagaacttaccgactggctttctctgcttgatcaagttataaaatcacagagggtgatggtgggtgaccttgaggatatcaacgagatgatcatcaagcagaaggcaacaatgcaggatttggaacagaggcgtccccagttggaagaactcattaccgctgcccaaaatttgaaaaacaagaccagcaatcaagaggctagaacaatcattacggatcgaattgaaagaattcagaatcagtgggatgaagtacaagaacaccttcagaaccggaggcaacagttgaatgaaatgttaaaggattcaacacaatggctggaagctaaggaagaagctgagcaggtcttaggacaggccagagccaagcttgagtcatggaaggagggtccctatacagtagatgcaatccaaaagaaaatcacagaaaccaagcagttggccaaagacctccgccagtggcagacaaatgtagatgtggcaaatgacttggccctgaaacttctccgggattattctgcagatgataccagaaaagtccacatgataacagagaatatcaatgcctcttggagaagcattcataaaagggtgagtgagcgagaggctgctttggaagaaactcatagattactgcaacagttccccctggacctggaaaagtttcttgcctggcttacagaagctgaaacaactgccaatgtcctacaggatgctacccgtaaggaaaggctcctagaagactccaagggagtaaaagagctgatgaaacaatggcaagacctccaaggtgaaattgaagctcacacagatgtttatcacaacctggatgaaaacagccaaaaaatcctgagatccctggaaggttccgatgatgcagtcctgttacaaagacgtttggataacatgaacttcaagtggagtgaacttcggaaaaagtctctcaacattaggtcccatttggaagccagttctgaccagtggaagcgtctgcacctttctctgcaggaacttctggtgtggctacagctgaaagatgatgaattaagccggcaggcacctattggaggcgactttccagcagttcagaagcagaacgatgtacatagggccttcaagagggaattgaaaactaaagaacctgtaatcatgagtactcttgagactgtacgaatatttctgacagagcagcctttggaaggactagagaaactctaccaggagcccagagagctgcctcctgaggagagagcccagaatgtcactcggcttctacgaaagcaggctgaggaggtcaatactgagtgggaaaaattgaacctgcactccgctgactggcagagaaaaatagatgagacccttgaaagactccgggaacttcaagaggccacggatgagctggacctcaagctgcgccaagctgaggtgatcaagggatcctggcagcccgtgggcgatctcctcattgactctctccaagatcacctcgagaaagtcaaggcacttcgaggagaaattgcgcctctgaaagagaacgtgagccacgtcaatgaccttgctcgccagcttaccactttgggcattcagctctcaccgtataacctcagcactctggaagacctgaacaccagatggaagcttctgcaggtggccgtcgaggaccgagtcaggcagctgcatgaagcccacagggactttggtccagcatctcagcactttctttccacgtctgtccagggtccctgggagagagccatctcgccaaacaaagtgccctactatatcaaccacgagactcaaacaacttgctgggaccatcccaaaatgacagagctctaccagtctttagctgacctgaataatgtcagattctcagcttataggactgccatgaaactccgaagactgcagaaggccctttgcttggatctcttgagcctgtcagctgcatgtgatgccttggaccagcacaacctcaagcaaaatgaccagcccatggatatcctgcagattattaattgtttgaccactatttatgaccgcctggagcaagagcacaacaatttggtcaacgtccctctctgcgtggatatgtgtctgaactggctgctgaatgtttatgatacgggacgaacagggaggatccgtgtcctgtcttttaaaactggcatcatttccctgtgtaaagcacatttggaagacaagtacagataccttttcaagcaagtggcaagttcaacaggattttgtgaccagcgcaggctgggcctccttctgcatgattctatccaaattccaagacagttgggtgaagttgcatcctttgggggcagtaacattgagccaagtgtccggagctgcttccaatttgctaataataagccagagatcgaagcggccctcttcctagactggatgagactggaaccccagtccatggtgtggctgcccgtcctgcacagagtggctgctgcagaaactgccaagcatcaggccaaatgtaacatctgcaaagagtgtccaatcattggattcaggtacaggagtctaaagcactttaattatgacatctgccaaagctgctttttttctggtcgagttgcaaaaggccataaaatgcactatcccatggtggaatattgcactccgactacatcaggagaagatgttcgagactttgccaaggtactaaaaaacaaatttcgaaccaaaaggtattttgcgaagcatccccgaatgggctacctgccagtgcagactgtcttagagggggacaacatggaaactcccgttactctgatcaacttctggccagtagattctgcgcctgcctcgtcccctcagctttcacacgatgatactcattcacgcattgaacattatgctagcaggctagcagaaatggaaaacagcaatggatcttatctaaatgatagcatctctcctaatgagagcatagatgatgaacatttgttaatccagcattactgccaaagtttgaaccaggactcccccctgagccagcctcgtagtcctgcccagatcttgatttccttagagagtgaggaaagaggggagctagagagaatcctagcagatcttgaggaagaaaacaggaatctgcaagcagaatatgaccgtctaaagcagcagcacgaacataaaggcctgtccccactgccgtcccctcctgaaatgatgcccacctctccccagagtccccgggatgctgagctcattgctgaggccaagctactgcgtcaacacaaaggccgcctggaagccaggatgcaaatcctggaagaccacaataaacagctggagtcacagttacacaggctaaggcagctgctggagcaaccccaggcagaggccaaagtgaatggcacaacggtgtcctctccttctacctctctacagaggtccgacagcagtcagcctatgctgctccgagtggttggcagtcaaacttcggactccatgggtgaggaagatcttctcagtcctccccaggacacaagcacagggttagaggaggtgatggagcaactcaacaactccttccctagttcaagaggacacaatgtaggaagtcttttccacatggcagatgatttgggcagagcgatggagtccttagtatcagtcatgacagatgaagaaggagcagaataaatgttttacaactcctgattcccgcatggtttttataatattcatacaacaaagaggattagacagtaagagtttacaagaaataaatctatatttttgtgaagggtagtggtattatactgtagatttcagtagtttctaagtctgttattgttttgttaacaatggcaggttttacacgtctatgcaattgtacaaaaaagttataagaaaactacatgtaaaatcttgatagctaaataacttgccatttctttatatggaacgcattttgggttgtttaaaaatttataacagttataaagaaagattgtaaactaaagtgtgctttataaaaaaaagttgtttataaaaacccctaaaaacaaaacaaacacacacacacacacatacacacacacacacaaaactttgaggcagcgcattgttttgcatccttttggcgtgatatccatatgaaattcatggctttttctttttttgcatattaaagataagacttcctctaccaccacaccaaatgactactacacactgctcatttgagaactgtcagctgagtggggcaggcttgagttttcatttcatatatctatatgtctataagtatataaatactatagttatatagataaagagatacgaatttctatagactgactttttccattttttaaatgttcatgtcacatcctaatagaaagaaattacttctagtcagtcatccaggcttacctgcttggtctagaatggatttttcccggagccggaagccaggaggaaactacaccacactaaaacattgtctacagctccagatgtttctcattttaaacaactttccactgacaacgaaagtaaagtaaagtattggatttttttaaagggaacatgtgaatgaatacacaggacttattatatcagagtgagtaatcggttggttggttgattgattgattgattgatacattcagcttcctgctgctagcaatgccacgatttagatttaatgatgcttcagtggaaatcaatcagaaggtattctgaccttgtgaacatcagaaggtattttttaactcccaagcagtagcaggacgatgatagggctggagggctatggattcccagcccatccctgtgaaggagtaggccactctttaagtgaaggattggatgattgttcataatacataaagttctctgtaattacaactaaattattatgccctcttctcacagtcaaaaggaactgggtggtttggtttttgttgcttttttagatttattgtcccatgtgggatgagtttttaaatgccacaagacataatttaaaataaataaactttgggaaaaggtgtaaaacagtagccccatcacatttgtgatactgacaggtatcaacccagaagcccatgaactgtgtttccatcctttgcatttctctgcgagtagttccacacaggtttgtaagtaagtaagaaagaaggcaaattgattcaaatgttacaaaaaaacccttcttggtggattagacaggttaaatatataaacaaacaaacaaaaattgctcaaaaaagaggagaaaagctcaagaggaaaagctaaggactggtaggaaaaagctttactctttcatgccattttatttctttttgatttttaaatcattcattcaatagataccaccgtgtgacctataattttgcaaatctgttacctctgacatcaagtgtaattagcttttggagagtgggctgacatcaagtgtaattagcttttggagagtgggttttgtccattattaataattaattaattaacatcaaacacggcttctcatgctatttctacctcactttggttttggggtgttcctgataattgtgcacacctgagttcacagcttcaccacttgtccattgcgttattttctttttcctttataattctttctttttccttcataattttcaaaagaaaacccaaagctctaaggtaacaaattaccaaattacatgaagatttggtttttgtcttgcatttttttcctttatgtgacgctggaccttttctttacccaaggatttttaaaactcagatttaaaacaaggggttactttacatcctactaagaagtttaagtaagtaagtttcattctaaaatcagaggtaaatagagtgcataaataattttgttttaatctttttgtttttcttttagacacattagctctggagtgagtctgtcataatatttgaacaaaaattgagagctttattgctgcattttaagcataattaatttggacattatttcgtgttgtgttctttataaccaccaagtattaaactgtaaatcataatgtaactgaagcataaacatcacatggcatgttttgtcattgttttcaggtactgagttcttacttgagtatcataatatattgtgttttaacaccaacactgtaacatttacgaattatttttttaaacttcagttttactgcattttcacaacatatcagacttcaccaaatatatgccttactattgtattatagtactgctttactgtgtatctcaataaagcacgcagttatgttacaaaaaagta

SEQ ID NO: 51 - protein, 1761 aa, Homo sapiens
MAVEPTQIQLSKRWREIESKFAQFRRLNFAQIHTVREETMMVMTEDMPLEISYVPSTYLTEITHVSQALLEVEQLLNAPDLCAKDFEDLFKQEESLKNIKDSLQQSSGRIDIIHSKKTAALQSATPVERVKLQEALSQLDFQWEKVNKMYKDRQGRFDRSVEKWRRFHYDIKIFNQWLTEAEQFLRKTQIPENWEHAKYKWYLKELQDGIGQRQTVVRTLNATGEEIIQQSSKTDASILQEKLGSLNLRWQEVCKQLSDRKKRLEEQKNILSEFQRDLNEFVLWLEEADNIASIPLEPGKEQQLKEKLEQVKLLVEELPLRQGILKQLNETGGPVLVSAPISPEEQDKLENKLKQTNLQWIKVSRALPEKQGEIEAQIKDLGQLEKKLEDLEEQLNHLLLWLSPIRNQLEIYNQPNQEGPFDVKETEIAVQAKQPDVEEILSKGQHLYKEKPATQPVKRKLEDLSSEWKAVNRLLQELRAKQPDLAPGLTTIGASPTQTVTLVTQPVVTKETAISKLEMPSSLMLEVPALADFNRAWTELTDWLSLLDQVIKSQRVMVGDLEDINEMIIKQKATMQDLEQRRPQLEELITAAQNLKNKTSNQEARTIITDRIERIQNQWDEVQEHLQNRRQQLNEMLKDSTQWLEAKEEAEQVLGQARAKLESWKEGPYTVDAIQKKITETKQLAKDLRQWQTNVDVANDLALKLLRDYSADDTRKVHMITENINASWRSIHKRVSEREAALEETHRLLQQFPLDLEKFLAWLTEAETTANVLQDATRKERLLEDSKGVKELMKQWQDLQGEIEAHTDVYHNLDENSQKILRSLEGSDDAVLLQRRLDNMNFKWSELRKKSLNIRSHLEASSDQWKRLHLSLQELLVWLQLKDDELSRQAPIGGDFPAVQKQNDVHRAFKRELKTKEPVIMSTLETVRIFLTEQPLEGLEKLYQEPRELPPEERAQNVTRLLRKQAEEVNTEWEKLNLHSADWQRKIDETLERLRELQEATDELDLKLRQAEVIKGSWQPVGDLLIDSLQDHLEKVKALRGEIAPLKENVSHVNDLARQLTTLGIQLSPYNLSTLEDLNTRWKLLQVAVEDRVRQLHEAHRDFGPASQHFLSTSVQGPWERAISPNKVPYYINHETQTTCWDHPKMTELYQSLADLNNVRFSAYRTAMKLRRLQKALCLDLLSLSAACDALDQHNLKQNDQPMDILQIINCLTTIYDRLEQEHNNLVNVPLCVDMCLNWLLNVYDTGRTGRIRVLSFKTGIISLCKAHLEDKYRYLFKQVASSTGFCDQRRLGLLLHDSIQIPRQLGEVASFGGSNIEPSVRSCFQFANNKPEIEAALFLDWMRLEPQSMVWLPVLHRVAAAETAKHQAKCNICKECPIIGFRYRSLKHFNYDICQSCFFSGRVAKGHKMHYPMVEYCTPTTSGEDVRDFAKVLKNKFRTKRYFAKHPRMGYLPVQTVLEGDNMETPVTLINFWPVDSAPASSPQLSHDDTHSRIEHYASRLAEMENSNGSYLNDSISPNESIDDEHLLIQHYCQSLNQDSPLSQPRSPAQILISLESEERGELERILADLEEENRNLQAEYDRLKQQHEHKGLSPLPSPPEMMPTSPQSPRDAELIAEAKLLRQHKGRLEARMQILEDHNKQLESQLHRLRQLLEQPQAEAKVNGTTVSSPSTSLQRSDSSQPMLLRVVGSQTSDSMGEEDLLSPPQDTSTGLEEVMEQLNNSFPSSRGHNVGSLFHMADDLGRAMESLVSVMTDEEGAE

SEQ ID NO: 52 - DNA, 13875 bp, Homo sapiens
actttccccctacaggactcagatctgggaggcaattaccttcggagaaaaacgaataggaaaaactgaagtgttactttttttaaagctgctgaagtttgttggtttctcattgtttttaagcctactggagcaataaagtttgaagaacttttaccaggttttttttatcgctgccttgatatacacttttcaaaatgctttggtgggaagaagtagaggactgttatgaaagagaagatgttcaaaagaaaacattcacaaaatgggtaaatgcacaattttctaagtttgggaagcagcatattgagaacctcttcagtgacctacaggatgggaggcgcctcctagacctcctcgaaggcctgacagggcaaaaactgccaaaagaaaaaggatccacaagagttcatgccctgaacaatgtcaacaaggcactgcgggttttgcagaacaataatgttgatttagtgaatattggaagtactgacatcgtagatggaaatcataaactgactcttggtttgatttggaatataatcctccactggcaggtcaaaaatgtaatgaaaaatatcatggctggattgcaacaaaccaacagtgaaaagattctcctgagctgggtccgacaatcaactcgtaattatccacaggttaatgtaatcaacttcaccaccagctggtctgatggcctggctttgaatgctctcatccatagtcataggccagacctatttgactggaatagtgtggtttgccagcagtcagccacacaacgactggaacatgcattcaacatcgccagatatcaattaggcatagagaaactactcgatcctgaagatgttgataccacctatccagataagaagtccatcttaatgtacatcacatcactcttccaagttttgcctcaacaagtgagcattgaagccatccaggaagtggaaatgttgccaaggccacctaaagtgactaaagaagaacattttcagttacatcatcaaatgcactattctcaacagatcacggtcagtctagcacagggatatgagagaacttcttcccctaagcctcgattcaagagctatgcctacacacaggctgcttatgtcaccacctctgaccctacacggagcccatttccttcacagcatttggaagctcctgaagacaagtcatttggcagttcattgatggagagtgaagtaaacctggaccgttatcaaacagctttagaagaagtattatcgtggcttctttctgctgaggacacattgcaagcacaaggagagatttctaatgatgtggaagtggtgaaagaccagtttcatactcatgaggggtacatgatggatttgacagcccatcagggccgggttggtaatattctacaattgggaagtaagctgattggaacaggaaaattatcagaagatgaagaaactgaagtacaagagcagatgaatctcctaaattcaagatgggaatgcctcagggtagctagcatggaaaaacaaagcaatttacatagagttttaatggatctccagaatcagaaactgaaagagttgaatgactggctaacaaaaacagaagaaagaacaaggaaaatggaggaagagcctcttggacctgatcttgaagacctaaaacgccaagtacaacaacataaggtgcttcaagaagatctagaacaagaacaagtcagggtcaattctctcactcacatggtggtggtagttgatgaatctagtggagatcacgcaactgctgctttggaagaacaacttaaggtattgggagatcgatgggcaaacatctgtagatggacagaagaccgctgggttcttttacaagacatccttctcaaatggcaacgtcttactgaagaacagtgcctttttagtgcatggctttcagaaaaagaagatgcagtgaacaagattcacacaactggctttaaagatcaaaatgaaatgttatcaagtcttcaaaaactggccgttttaaaagcggatctagaaaagaaaaagcaatccatgggcaaactgtattcactcaaacaagatcttctttcaacactgaagaataagtcagtgacccagaagacggaagcatggctggataactttgcccggtgttgggataatttagtccaaaaacttgaaaagagtacagcacagatttcacaggctgtcaccaccactcagccatcactaacacagacaactgtaatggaaacagtaactacggtgaccacaagggaacagatcctggtaaagcatgctcaagaggaacttccaccaccacctccccaaaagaagaggcagattactgtggattctgaaattaggaaaaggttggatgttgatataactgaacttcacagctggattactcgctcagaagctgtgttgcagagtcctgaatttgcaatctttcggaaggaaggcaacttctcagacttaaaagaaaaagtcaatgccatagagcgagaaaaagctgagaagttcagaaaactgcaagatgccagcagatcagctcaggccctggtggaacagatggtgaatgagggtgttaatgcagatagcatcaaacaagcctcagaacaactgaacagccggtggatcgaattctgccagttgctaagtgagagacttaactggctggagtatcagaacaacatcatcgctttctataatcagctacaacaattggagcagatgacaactactgctgaaaactggttgaaaatccaacccaccaccccatcagagccaacagcaattaaaagtcagttaaaaatttgtaaggatgaagtcaaccggctatcagatcttcaacctcaaattgaacgattaaaaattcaaagcatagccctgaaagagaaaggacaaggacccatgttcctggatgcagactttgtggcctttacaaatcattttaagcaagtcttttctgatgtgcaggccagagagaaagagctacagacaatttttgacactttgccaccaatgcgctatcaggagaccatgagtgccatcaggacatgggtccagcagtcagaaaccaaactctccatacctcaacttagtgtcaccgactatgaaatcatggagcagagactcggggaattgcaggctttacaaagttctctgcaagagcaacaaagtggcctatactatctcagcaccactgtgaaagagatgtcgaagaaagcgccctctgaaattagccggaaatatcaatcagaatttgaagaaattgagggacgctggaagaagctctcctcccagctggttgagcattgtcaaaagctagaggagcaaatgaataaactccgaaaaattcagaatcacatacaaaccctgaagaaatggatggctgaagttgatgtttttctgaaggaggaatggcctgcccttggggattcagaaattctaaaaaagcagctgaaacagtgcagacttttagtcagtgatattcagacaattcagcccagtctaaacagtgtcaatgaaggtgggcagaagataaagaatgaagcagagccagagtttgcttcgagacttgagacagaactcaaagaacttaacactcagtgggatcacatgtgccaacaggtctatgccagaaaggaggccttgaagggaggtttggagaaaactgtaagcctccagaaagatctatcagagatgcacgaatggatgacacaagctgaagaagagtatcttgagagagattttgaatataaaactccagatgaattacagaaagcagttgaagagatgaagagagctaaagaagaggcccaacaaaaagaagcgaaagtgaaactccttactgagtctgtaaatagtgtcatagctcaagctccacctgtagcacaagaggccttaaaaaaggaacttgaaactctaaccaccaactaccagtggctctgcactaggctgaatgggaaatgcaagactttggaagaagtttgggcatgttggcatgagttattgtcatacttggagaaagcaaacaagtggctaaatgaagtagaatttaaacttaaaaccactgaaaacattcctggcggagctgaggaaatctctgaggtgctagattcacttgaaaatttgatgcgacattcagaggataacccaaatcagattcgcatattggcacagaccctaacagatggcggagtcatggatgagctaatcaatgaggaacttgagacatttaattctcgttggagggaactacatgaagaggctgtaaggaggcaaaagttgcttgaacagagcatccagtctgcccaggagactgaaaaatccttacacttaatccaggagtccctcacattcattgacaagcagttggcagcttatattgcagacaaggtggacgcagctcaaatgcctcaggaagcccagaaaatccaatctgatttgacaagtcatgagatcagtttagaagaaatgaagaaacataatcaggggaaggaggctgcccaaagagtcctgtctcagattgatgttgcacagaaaaaattacaagatgtctccatgaagtttcgattattccagaaaccagccaattttgagcagcgtctacaagaaagtaagatgattttagatgaagtgaagatgcacttgcctgcattggaaacaaagagtgtggaacaggaagtagtacagtcacagctaaatcattgtgtgaacttgtataaaagtctgagtgaagtgaagtctgaagtggaaatggtgataaagactggacgtcagattgtacagaaaaagcagacggaaaatcccaaagaacttgatgaaagagtaacagctttgaaattgcattataatgagctgggagcaaaggtaacagaaagaaagcaacagttggagaaatgcttgaaattgtcccgtaagatgcgaaaggaaatgaatgtcttgacagaatggctggcagctacagatatggaattgacaaagagatcagcagttgaaggaatgcctagtaatttggattctgaagttgcctggggaaaggctactcaaaaagagattgagaaacagaaggtgcacctgaagagtatcacagaggtaggagaggccttgaaaacagttttgggcaagaaggagacgttggtggaagataaactcagtcttctgaatagtaactggatagctgtcacctcccgagcagaagagtggttaaatcttttgttggaataccagaaacacatggaaacttttgaccagaatgtggaccacatcacaaagtggatcattcaggctgacacacttttggatgaatcagagaaaaagaaaccccagcaaaaagaagacgtgcttaagcgtttaaaggcagaactgaatgacatacgcccaaaggtggactctacacgtgaccaagcagcaaacttgatggcaaaccgcggtgaccactgcaggaaattagtagagccccaaatctcagagctcaaccatcgatttgcagccatttcacacagaattaagactggaaaggcctccattcctttgaaggaattggagcagtttaactcagatatacaaaaattgcttgaaccactggaggctgaaattcagcagggggtgaatctgaaagaggaagacttcaataaagatatgaatgaagacaatgagggtactgtaaaagaattgttgcaaagaggagacaacttacaacaaagaatcacagatgagagaaagcgagaggaaataaagataaaacagcagctgttacagacaaaacataatgctctcaaggatttgaggtctcaaagaagaaaaaaggctctagaaatttctcatcagtggtatcagtacaagaggcaggctgatgatctcctgaaatgcttggatgacattgaaaaaaaattagccagcctacctgagcccagagatgaaaggaaaataaaggaaattgatcgggaattgcagaagaagaaagaggagctgaatgcagtgcgtaggcaagctgagggcttgtctgaggatggggccgcaatggcagtggagccaactcagatccagctcagcaagcgctggcgggaaattgagagcaaatttgctcagtttcgaagactcaactttgcacaaattcacactgtccgtgaagaaacgatgatggtgatgactgaagacatgcctttggaaatttcttatgtgccttctacttatttgactgaaatcactcatgtctcacaagccctattagaagtggaacaacttctcaatgctcctgacctctgtgctaaggactttgaagatctctttaagcaagaggagtctctgaagaatataaaagatagtctacaacaaagctcaggtcggattgacattattcatagcaagaagacagcagcattgcaaagtgcaacgcctgtggaaagggtgaagctacaggaagctctctcccagcttgatttccaatgggaaaaagttaacaaaatgtacaaggaccgacaagggcgatttgacagatctgttgagaaatggcggcgttttcattatgatataaagatatttaatcagtggctaacagaagctgaacagtttctcagaaagacacaaattcctgagaattgggaacatgctaaatacaaatggtatcttaaggaactccaggatggcattgggcagcggcaaactgttgtcagaacattgaatgcaactggggaagaaataattcagcaatcctcaaaaacagatgccagtattctacaggaaaaattgggaagcctgaatctgcggtggcaggaggtctgcaaacagctgtcagacagaaaaaagaggctagaagaacaaaagaatatcttgtcagaatttcaaagagatttaaatgaatttgttttatggttggaggaagcagataacattgctagtatcccacttgaacctggaaaagagcagcaactaaaagaaaagcttgagcaagtcaagttactggtggaagagttgcccctgcgccagggaattctcaaacaattaaatgaaactggaggacccgtgcttgtaagtgctcccataagcccagaagagcaagataaacttgaaaataagctcaagcagacaaatctccagtggataaaggtttccagagctttacctgagaaacaaggagaaattgaagctcaaataaaagaccttgggcagcttgaaaaaaagcttgaagaccttgaagagcagttaaatcatctgctgctgtggttatctcctattaggaatcagttggaaatttataaccaaccaaaccaagaaggaccatttgacgttaaggaaactgaaatagcagttcaagctaaacaaccggatgtggaagagattttgtctaaagggcagcatttgtacaaggaaaaaccagccactcagccagtgaagaggaagttagaagatctgagctctgagtggaaggcggtaaaccgtttacttcaagagctgagggcaaagcagcctgacctagctcctggactgaccactattggagcctctcctactcagactgttactctggtgacacaacctgtggttactaaggaaactgccatctccaaactagaaatgccatcttccttgatgttggaggtacctgctctggcagatttcaaccgggcttggacagaacttaccgactggctttctctgcttgatcaagttataaaatcacagagggtgatggtgggtgaccttgaggatatcaacgagatgatcatcaagcagaaggcaacaatgcaggatttggaacagaggcgtccccagttggaagaactcattaccgctgcccaaaatttgaaaaacaagaccagcaatcaagaggctagaacaatcattacggatcgaattgaaagaattcagaatcagtgggatgaagtacaagaacaccttcagaaccggaggcaacagttgaatgaaatgttaaaggattcaacacaatggctggaagctaaggaagaagctgagcaggtcttaggacaggccagagccaagcttgagtcatggaaggagggtccctatacagtagatgcaatccaaaagaaaatcacagaaaccaagcagttggccaaagacctccgccagtggcagacaaatgtagatgtggcaaatgacttggccctgaaacttctccgggattattctgcagatgataccagaaaagtccacatgataacagagaatatcaatgcctcttggagaagcattcataaaagggtgagtgagcgagaggctgctttggaagaaactcatagattactgcaacagttccccctggacctggaaaagtttcttgcctggcttacagaagctgaaacaactgccaatgtcctacaggatgctacccgtaaggaaaggctcctagaagactccaagggagtaaaagagctgatgaaacaatggcaagacctccaaggtgaaattgaagctcacacagatgtttatcacaacctggatgaaaacagccaaaaaatcctgagatccctggaaggttccgatgatgcagtcctgttacaaagacgtttggataacatgaacttcaagtggagtgaacttcggaaaaagtctctcaacattaggtcccatttggaagccagttctgaccagtggaagcgtctgcacctttctctgcaggaacttctggtgtggctacagctgaaagatgatgaattaagccggcaggcacctattggaggcgactttccagcagttcagaagcagaacgatgtacatagggccttcaagagggaattgaaaactaaagaacctgtaatcatgagtactcttgagactgtacgaatatttctgacagagcagcctttggaaggactagagaaactctaccaggagcccagagagctgcctcctgaggagagagcccagaatgtcactcggcttctacgaaagcaggctgaggaggtcaatactgagtgggaaaaattgaacctgcactccgctgactggcagagaaaaatagatgagacccttgaaagactccgggaacttcaagaggccacggatgagctggacctcaagctgcgccaagctgaggtgatcaagggatcctggcagcccgtgggcgatctcctcattgactctctccaagatcacctcgagaaagtcaaggcacttcgaggagaaattgcgcctctgaaagagaacgtgagccacgtcaatgaccttgctcgccagcttaccactttgggcattcagctctcaccgtataacctcagcactctggaagacctgaacaccagatggaagcttctgcaggtggccgtcgaggaccgagtcaggcagctgcatgaagcccacagggactttggtccagcatctcagcactttctttccacgtctgtccagggtccctgggagagagccatctcgccaaacaaagtgccctactatatcaaccacgagactcaaacaacttgctgggaccatcccaaaatgacagagctctaccagtctttagctgacctgaataatgtcagattctcagcttataggactgccatgaaactccgaagactgcagaaggccctttgcttggatctcttgagcctgtcagctgcatgtgatgccttggaccagcacaacctcaagcaaaatgaccagcccatggatatcctgcagattattaattgtttgaccactatttatgaccgcctggagcaagagcacaacaatttggtcaacgtccctctctgcgtggatatgtgtctgaactggctgctgaatgtttatgatacgggacgaacagggaggatccgtgtcctgtcttttaaaactggcatcatttccctgtgtaaagcacatttggaagacaagtacagataccttttcaagcaagtggcaagttcaacaggattttgtgaccagcgcaggctgggcctccttctgcatgattctatccaaattccaagacagttgggtgaagttgcatcctttgggggcagtaacattgagccaagtgtccggagctgcttccaatttgctaataataagccagagatcgaagcggccctcttcctagactggatgagactggaaccccagtccatggtgtggctgcccgtcctgcacagagtggctgctgcagaaactgccaagcatcaggccaaatgtaacatctgcaaagagtgtccaatcattggattcaggtacaggagtctaaagcactttaattatgacatctgccaaagctgctttttttctggtcgagttgcaaaaggccataaaatgcactatcccatggtggaatattgcactccgactacatcaggagaagatgttcgagactttgccaaggtactaaaaaacaaatttcgaaccaaaaggtattttgcgaagcatccccgaatgggctacctgccagtgcagactgtcttagagggggacaacatggaaacgcctgcctcgtcccctcagctttcacacgatgatactcattcacgcattgaacattatgctagcaggctagcagaaatggaaaacagcaatggatcttatctaaatgatagcatctctcctaatgagagcatagatgatgaacatttgttaatccagcattactgccaaagtttgaaccaggactcccccctgagccagcctcgtagtcctgcccagatcttgatttccttagagagtgaggaaagaggggagctagagagaatcctagcagatcttgaggaagaaaacaggaatctgcaagcagaatatgaccgtctaaagcagcagcacgaacataaaggcctgtccccactgccgtcccctcctgaaatgatgcccacctctccccagagtccccgggatgctgagctcattgctgaggccaagctactgcgtcaacacaaaggccgcctggaagccaggatgcaaatcctggaagaccacaataaacagctggagtcacagttacacaggctaaggcagctgctggagcaaccccaggcagaggccaaagtgaatggcacaacggtgtcctctccttctacctctctacagaggtccgacagcagtcagcctatgctgctccgagtggttggcagtcaaacttcggactccatgggtgaggaagatcttctcagtcctccccaggacacaagcacagggttagaggaggtgatggagcaactcaacaactccttccctagttcaagaggacacaatgtaggaagtcttttccacatggcagatgatttgggcagagcgatggagtccttagtatcagtcatgacagatgaagaaggagcagaataaatgttttacaactcctgattcccgcatggtttttataatattcatacaacaaagaggattagacagtaagagtttacaagaaataaatctatatttttgtgaagggtagtggtattatactgtagatttcagtagtttctaagtctgttattgttttgttaacaatggcaggttttacacgtctatgcaattgtacaaaaaagttataagaaaactacatgtaaaatcttgatagctaaataacttgccatttctttatatggaacgcattttgggttgtttaaaaatttataacagttataaagaaagattgtaaactaaagtgtgctttataaaaaaaagttgtttataaaaacccctaaaaacaaaacaaacacacacacacacacatacacacacacacacaaaactttgaggcagcgcattgttttgcatccttttggcgtgatatccatatgaaattcatggctttttctttttttgcatattaaagataagacttcctctaccaccacaccaaatgactactacacactgctcatttgagaactgtcagctgagtggggcaggcttgagttttcatttcatatatctatatgtctataagtatataaatactatagttatatagataaagagatacgaatttctatagactgactttttccattttttaaatgttcatgtcacatcctaatagaaagaaattacttctagtcagtcatccaggcttacctgcttggtctagaatggatttttcccggagccggaagccaggaggaaactacaccacactaaaacattgtctacagctccagatgtttctcattttaaacaactttccactgacaacgaaagtaaagtaaagtattggatttttttaaagggaacatgtgaatgaatacacaggacttattatatcagagtgagtaatcggttggttggttgattgattgattgattgatacattcagcttcctgctgctagcaatgccacgatttagatttaatgatgcttcagtggaaatcaatcagaaggtattctgaccttgtgaacatcagaaggtattttttaactcccaagcagtagcaggacgatgatagggctggagggctatggattcccagcccatccctgtgaaggagtaggccactctttaagtgaaggattggatgattgttcataatacataaagttctctgtaattacaactaaattattatgccctcttctcacagtcaaaaggaactgggtggtttggtttttgttgcttttttagatttattgtcccatgtgggatgagtttttaaatgccacaagacataatttaaaataaataaactttgggaaaaggtgtaaaacagtagccccatcacatttgtgatactgacaggtatcaacccagaagcccatgaactgtgtttccatcctttgcatttctctgcgagtagttccacacaggtttgtaagtaagtaagaaagaaggcaaattgattcaaatgttacaaaaaaacccttcttggtggattagacaggttaaatatataaacaaacaaacaaaaattgctcaaaaaagaggagaaaagctcaagaggaaaagctaaggactggtaggaaaaagctttactctttcatgccattttatttctttttgatttttaaatcattcattcaatagataccaccgtgtgacctataattttgcaaatctgttacctctgacatcaagtgtaattagcttttggagagtgggctgacatcaagtgtaattagcttttggagagtgggttttgtccattattaataattaattaattaacatcaaacacggcttctcatgctatttctacctcactttggttttggggtgttcctgataattgtgcacacctgagttcacagcttcaccacttgtccattgcgttattttctttttcctttataattctttctttttccttcataattttcaaaagaaaacccaaagctctaaggtaacaaattaccaaattacatgaagatttggtttttgtcttgcatttttttcctttatgtgacgctggaccttttctttacccaaggatttttaaaactcagatttaaaacaaggggttactttacatcctactaagaagtttaagtaagtaagtttcattctaaaatcagaggtaaatagagtgcataaataattttgttttaatctttttgtttttcttttagacacattagctctggagtgagtctgtcataatatttgaacaaaaattgagagctttattgctgcattttaagcataattaatttggacattatttcgtgttgtgttctttataaccaccaagtattaaactgtaaatcataatgtaactgaagcataaacatcacatggcatgttttgtcattgttttcaggtactgagttcttacttgagtatcataatatattgtgttttaacaccaacactgtaacatttacgaattatttttttaaacttcagttttactgcattttcacaacatatcagacttcaccaaatatatgccttactattgtattatagtactgctttactgtgtatctcaataaagcacgcagttatgttac

SEQ ID NO: 53 - protein, 3690 aa, Homo sapiens
MLWWEEVEDCYEREDVQKKTFTKWVNAQFSKFGKQHIENLFSDLQDGRRLLDLLEGLTGQKLPKEKGSTRVHALNNVNKALRVLQNNNVDLVNIGSTDIVDGNHKLTLGLIWNIILHWQVKNVMKNIMAGLQQTNSEKILLSWVRQSTRNYPQVNVINFTTSWSDGLALNALIHSHRPDLFDWNSVVCQQSATQRLEHAFNIARYQLGIEKLLDPEDVDTTYPDKKSILMYITSLFQVLPQQVSIEAIQEVEMLPRPPKVTKEEHFQLHHQMHYSQQITVSLAQGYERTSSPKPRFKSYAYTQAAYVTTSDPTRSPFPSQHLEAPEDKSFGSSLMESEVNLDRYQTALEEVLSWLLSAEDTLQAQGEISNDVEVVKDQFHTHEGYMMDLTAHQGRVGNILQLGSKLIGTGKLSEDEETEVQEQMNLLNSRWECLRVASMEKQSNLHRVLMDLQNQKLKELNDWLTKTEERTRKMEEEPLGPDLEDLKRQVQQHKVLQEDLEQEQVRVNSLTHMVVVVDESSGDHATAALEEQLKVLGDRWANICRWTEDRWVLLQDILLKWQRLTEEQCLFSAWLSEKEDAVNKIHTTGFKDQNEMLSSLQKLAVLKADLEKKKQSMGKLYSLKQDLLSTLKNKSVTQKTEAWLDNFARCWDNLVQKLEKSTAQISQAVTTTQPSLTQTTVMETVTTVTTREQILVKHAQEELPPPPPQKKRQITVDSEIRKRLDVDITELHSWITRSEAVLQSPEFAIFRKEGNFSDLKEKVNAIEREKAEKFRKLQDASRSAQALVEQMVNEGVNADSIKQASEQLNSRWIEFCQLLSERLNWLEYQNNIIAFYNQLQQLEQMTTTAENWLKIQPTTPSEPTAIKSQLKICKDEVNRLSDLQPQIERLKIQSIALKEKGQGPMFLDADFVAFTNHFKQVFSDVQAREKELQTIFDTLPPMRYQETMSAIRTWVQQSETKLSIPQLSVTDYEIMEQRLGELQALQSSLQEQQSGLYYLSTTVKEMSKKAPSEISRKYQSEFEEIEGRWKKLSSQLVEHCQKLEEQMNKLRKIQNHIQTLKKWMAEVDVFLKEEWPALGDSEILKKQLKQCRLLVSDIQTIQPSLNSVNEGGQKIKNEAEPEFASRLETELKELNTQWDHMCQQVYARKEALKGGLEKTVSLQKDLSEMHEWMTQAEEEYLERDFEYKTPDELQKAVEEMKRAKEEAQQKEAKVKLLTESVNSVIAQAPPVAQEALKKELETLTTNYQWLCTRLNGKCKTLEEVWACWHELLSYLEKANKWLNEVEFKLKTTENIPGGAEEISEVLDSLENLMRHSEDNPNQIRILAQTLTDGGVMDELINEELETFNSRWRELHEEAVRRQKLLEQSIQSAQETEKSLHLIQESLTFIDKQLAAYIADKVDAAQMPQEAQKIQSDLTSHEISLEEMKKHNQGKEAAQRVLSQIDVAQKKLQDVSMKFRLFQKPANFEQRLQESKMILDEVKMHLPALETKSVEQEVVQSQLNHCVNLYKSLSEVKSEVEMVIKTGRQIVQKKQTENPKELDERVTALKLHYNELGAKVTERKQQLEKCLKLSRKMRKEMNVLTEWLAATDMELTKRSAVEGMPSNLDSEVAWGKATQKEIEKQKVHLKSITEVGEALKTVLGKKETLVEDKLSLLNSNWIAVTSRAEEWLNLLLEYQKHMETFDQNVDHITKWIIQADTLLDESEKKKPQQKEDVLKRLKAELNDIRPKVDSTRDQAANLMANRGDHCRKLVEPQISELNHRFAAISHRIKTGKASIPLKELEQFNSDIQKLLEPLEAEIQQGVNLKEEDFNKDMNEDNEGTVKELLQRGDNLQQRITDERKREEIKIKQQLLQTKHNALKDLRSQRRKKALEISHQWYQYKRQADDLLKCLDDIEKKLASLPEPRDERKIKEIDRELQKKKEELNAVRRQAEGLSEDGAAMAVEPTQIQLSKRWREIESKFAQFRRLNFAQIHTVREETMMVMTEDMPLEISYVPSTYLTEITHVSQALLEVEQLLNAPDLCAKDFEDLFKQEESLKNIKDSLQQSSGRIDIIHSKKTAALQSATPVERVKLQEALSQLDFQWEKVNKMYKDRQGRFDRSVEKWRRFHYDIKIFNQWLTEAEQFLRKTQIPENWEHAKYKWYLKELQDGIGQRQTVVRTLNATGEEIIQQSSKTDASILQEKLGSLNLRWQEVCKQLSDRKKRLEEQKNILSEFQRDLNEFVLWLEEADNIASIPLEPGKEQQLKEKLEQVKLLVEELPLRQGILKQLNETGGPVLVSAPISPEEQDKLENKLKQTNLQWIKVSRALPEKQGEIEAQIKDLGQLEKKLEDLEEQLNHLLLWLSPIRNQLEIYNQPNQEGPFDVKETEIAVQAKQPDVEEILSKGQHLYKEKPATQPVKRKLEDLSSEWKAVNRLLQELRAKQPDLAPGLTTIGASPTQTVTLVTQPVVTKETAISKLEMPSSLMLEVPALADFNRAWTELTDWLSLLDQVIKSQRVMVGDLEDINEMIIKQKATMQDLEQRRPQLEELITAAQNLKNKTSNQEARTIITDRIERIQNQWDEVQEHLQNRRQQLNEMLKDSTQWLEAKEEAEQVLGQARAKLESWKEGPYTVDAIQKKITETKQLAKDLRQWQTNVDVANDLALKLLRDYSADDTRKVHMITENINASWRSIHKRVSEREAALEETHRLLQQFPLDLEKFLAWLTEAETTANVLQDATRKERLLEDSKGVKELMKQWQDLQGEIEAHTDVYHNLDENSQKILRSLEGSDDAVLLQRRLDNMNFKWSELRKKSLNIRSHLEASSDQWKRLHLSLQELLVWLQLKDDELSRQAPIGGDFPAVQKQNDVHRAFKRELKTKEPVIMSTLETVRIFLTEQPLEGLEKLYQEPRELPPEERAQNVTRLLRKQAEEVNTEWEKLNLHSADWQRKIDETLERLRELQEATDELDLKLRQAEVIKGSWQPVGDLLIDSLQDHLEKVKALRGEIAPLKENVSHVNDLARQLTTLGIQLSPYNLSTLEDLNTRWKLLQVAVEDRVRQLHEAHRDFGPASQHFLSTSVQGPWERAISPNKVPYYINHETQTTCWDHPKMTELYQSLADLNNVRFSAYRTAMKLRRLQKALCLDLLSLSAACDALDQHNLKQNDQPMDILQIINCLTTIYDRLEQEHNNLVNVPLCVDMCLNWLLNVYDTGRTGRIRVLSFKTGIISLCKAHLEDKYRYLFKQVASSTGFCDQRRLGLLLHDSIQIPRQLGEVASFGGSNIEPSVRSCFQFANNKPEIEAALFLDWMRLEPQSMVWLPVLHRVAAAETAKHQAKCNICKECPIIGFRYRSLKHFNYDICQSCFFSGRVAKGHKMHYPMVEYCTPTTSGEDVRDFAKVLKNKFRTKRYFAKHPRMGYLPVQTVLEGDNMETPASSPQLSHDDTHSRIEHYASRLAEMENSNGSYLNDSISPNESIDDEHLLIQHYCQSLNQDSPLSQPRSPAQILISLESEERGELERILADLEEENRNLQAEYDRLKQQHEHKGLSPLPSPPEMMPTSPQSPRDAELIAEAKLLRQHKGRLEARMQILEDHNKQLESQLHRLRQLLEQPQAEAKVNGTTVSSPSTSLQRSDSSQPMLLRVVGSQTSDSMGEEDLLSPPQDTSTGLEEVMEQLNNSFPSSRGHNVGSLFHMADDLGRAMESLVSVMTDEEGAE

SEQ ID NO: 54 - DNA, 13055 bp, Homo sapiens
actttccccctacaggactcagatctgggaggcaattaccttcggagaaaaacgaataggaaaaactgaagtgttactttttttaaagctgctgaagtttgttggtttctcattgtttttaagcctactggagcaataaagtttgaagaacttttaccaggttttttttatcgctgccttgatatacacttttcaaaatgctttggtgggaagaagtagaggactgttatgaaagagaagatgttcaaaagaaaacattcacaaaatgggtaaatgcacaattttctaagtttgggaagcagcatattgagaacctcttcagtgacctacaggatgggaggcgcctcctagacctcctcgaaggcctgacagggcaaaaactgccaaaagaaaaaggatccacaagagttcatgccctgaacaatgtcaacaaggcactgcgggttttgcagaacaataatgttgatttagtgaatattggaagtactgacatcgtagatggaaatcataaactgactcttggtttgatttggaatataatcctccactggcaggtcaaaaatgtaatgaaaaatatcatggctggattgcaacaaaccaacagtgaaaagattctcctgagctgggtccgacaatcaactcgtaattatccacaggttaatgtaatcaacttcaccaccagctggtctgatggcctggctttgaatgctctcatccatagtcataggccagacctatttgactggaatagtgtggtttgccagcagtcagccacacaacgactggaacatgcattcaacatcgccagatatcaattaggcatagagaaactactcgatcctgaagatgttgataccacctatccagataagaagtccatcttaatgtacatcacatcactcttccaagttttgcctcaacaagtgagcattgaagccatccaggaagtggaaatgttgccaaggccacctaaagtgactaaagaagaacattttcagttacatcatcaaatgcactattctcaacagatcacggtcagtctagcacagggatatgagagaacttcttcccctaagcctcgattcaagagctatgcctacacacaggctgcttatgtcaccacctctgaccctacacggagcccatttccttcacagcatttggaagctcctgaagacaagtcatttggcagttcattgatggagagtgaagtaaacctggaccgttatcaaacagctttagaagaagtattatcgtggcttctttctgctgaggacacattgcaagcacaaggagagatttctaatgatgtggaagtggtgaaagaccagtttcatactcatgaggggtacatgatggatttgacagcccatcagggccgggttggtaatattctacaattgggaagtaagctgattggaacaggaaaattatcagaagatgaagaaactgaagtacaagagcagatgaatctcctaaattcaagatgggaatgcctcagggtagctagcatggaaaaacaaagcaatttacatagagttttaatggatctccagaatcagaaactgaaagagttgaatgactggctaacaaaaacagaagaaagaacaaggaaaatggaggaagagcctcttggacctgatcttgaagacctaaaacgccaagtacaacaacataaggtgcttcaagaagatctagaacaagaacaagtcagggtcaattctctcactcacatggtggtggtagttgatgaatctagtggagatcacgcaactgctgctttggaagaacaacttaaggtattgggagatcgatgggcaaacatctgtagatggacagaagaccgctgggttcttttacaagacatccttctcaaatggcaacgtcttactgaagaacagtgcctttttagtgcatggctttcagaaaaagaagatgcagtgaacaagattcacacaactggctttaaagatcaaaatgaaatgttatcaagtcttcaaaaactggccgttttaaaagcggatctagaaaagaaaaagcaatccatgggcaaactgtattcactcaaacaagatcttctttcaacactgaagaataagtcagtgacccagaagacggaagcatggctggataactttgcccggtgttgggataatttagtccaaaaacttgaaaagagtacagcacagatttcacaggctgtcaccaccactcagccatcactaacacagacaactgtaatggaaacagtaactacggtgaccacaagggaacagatcctggtaaagcatgctcaagaggaacttccaccaccacctccccaaaagaagaggcagattactgtggattctgaaattaggaaaaggttggatgttgatataactgaacttcacagctggattactcgctcagaagctgtgttgcagagtcctgaatttgcaatctttcggaaggaaggcaacttctcagacttaaaagaaaaagtcaatgccatagagcgagaaaaagctgagaagttcagaaaactgcaagatgccagcagatcagctcaggccctggtggaacagatggtgaatgagggtgttaatgcagatagcatcaaacaagcctcagaacaactgaacagccggtggatcgaattctgccagttgctaagtgagagacttaactggctggagtatcagaacaacatcatcgctttctataatcagctacaacaattggagcagatgacaactactgctgaaaactggttgaaaatccaacccaccaccccatcagagccaacagcaattaaaagtcagttaaaaatttgtaaggatgaagtcaaccggctatcagatcttcaacctcaaattgaacgattaaaaattcaaagcatagccctgaaagagaaaggacaaggacccatgttcctggatgcagactttgtggcctttacaaatcattttaagcaagtcttttctgatgtgcaggccagagagaaagagctacagacaatttttgacactttgccaccaatgcgctatcaggagaccatgagtgccatcaggacatgggtccagcagtcagaaaccaaactctccatacctcaacttagtgtcaccgactatgaaatcatggagcagagactcggggaattgcaggctttacaaagttctctgcaagagcaacaaagtggcctatactatctcagcaccactgtgaaagagatgtcgaagaaagcgccctctgaaattagccggaaatatcaatcagaatttgaagaaattgagggacgctggaagaagctctcctcccagctggttgagcattgtcaaaagctagaggagcaaatgaataaactccgaaaaattcagaatcacatacaaaccctgaagaaatggatggctgaagttgatgtttttctgaaggaggaatggcctgcccttggggattcagaaattctaaaaaagcagctgaaacagtgcagacttttagtcagtgatattcagacaattcagcccagtctaaacagtgtcaatgaaggtgggcagaagataaagaatgaagcagagccagagtttgcttcgagacttgagacagaactcaaagaacttaacactcagtgggatcacatgtgccaacaggtctatgccagaaaggaggccttgaagggaggtttggagaaaactgtaagcctccagaaagatctatcagagatgcacgaatggatgacacaagctgaagaagagtatcttgagagagattttgaatataaaactccagatgaattacagaaagcagttgaagagatgaagagagctaaagaagaggcccaacaaaaagaagcgaaagtgaaactccttactgagtctgtaaatagtgtcatagctcaagctccacctgtagcacaagaggccttaaaaaaggaacttgaaactctaaccaccaactaccagtggctctgcactaggctgaatgggaaatgcaagactttggaagaagtttgggcatgttggcatgagttattgtcatacttggagaaagcaaacaagtggctaaatgaagtagaatttaaacttaaaaccactgaaaacattcctggcggagctgaggaaatctctgaggtgctagattcacttgaaaatttgatgcgacattcagaggataacccaaatcagattcgcatattggcacagaccctaacagatggcggagtcatggatgagctaatcaatgaggaacttgagacatttaattctcgttggagggaactacatgaagaggctgtaaggaggcaaaagttgcttgaacagagcatccagtctgcccaggagactgaaaaatccttacacttaatccaggagtccctcacattcattgacaagcagttggcagcttatattgcagacaaggtggacgcagctcaaatgcctcaggaagcccagaaaatccaatctgatttgacaagtcatgagatcagtttagaagaaatgaagaaacataatcaggggaaggaggctgcccaaagagtcctgtctcagattgatgttgcacagaaaaaattacaagatgtctccatgaagtttcgattattccagaaaccagccaattttgagcagcgtctacaagaaagtaagatgattttagatgaagtgaagatgcacttgcctgcattggaaacaaagagtgtggaacaggaagtagtacagtcacagctaaatcattgtgtgaacttgtataaaagtctgagtgaagtgaagtctgaagtggaaatggtgataaagactggacgtcagattgtacagaaaaagcagacggaaaatcccaaagaacttgatgaaagagtaacagctttgaaattgcattataatgagctgggagcaaaggtaacagaaagaaagcaacagttggagaaatgcttgaaattgtcccgtaagatgcgaaaggaaatgaatgtcttgacagaatggctggcagctacagatatggaattgacaaagagatcagcagttgaaggaatgcctagtaatttggattctgaagttgcctggggaaaggctactcaaaaagagattgagaaacagaaggtgcacctgaagagtatcacagaggtaggagaggccttgaaaacagttttgggcaagaaggagacgttggtggaagataaactcagtcttctgaatagtaactggatagctgtcacctcccgagcagaagagtggttaaatcttttgttggaataccagaaacacatggaaacttttgaccagaatgtggaccacatcacaaagtggatcattcaggctgacacacttttggatgaatcagagaaaaagaaaccccagcaaaaagaagacgtgcttaagcgtttaaaggcagaactgaatgacatacgcccaaaggtggactctacacgtgaccaagcagcaaacttgatggcaaaccgcggtgaccactgcaggaaattagtagagccccaaatctcagagctcaaccatcgatttgcagccatttcacacagaattaagactggaaaggcctccattcctttgaaggaattggagcagtttaactcagatatacaaaaattgcttgaaccactggaggctgaaattcagcagggggtgaatctgaaagaggaagacttcaataaagatatgaatgaagacaatgagggtactgtaaaagaattgttgcaaagaggagacaacttacaacaaagaatcacagatgagagaaagcgagaggaaataaagataaaacagcagctgttacagacaaaacataatgctctcaaggatttgaggtctcaaagaagaaaaaaggctctagaaatttctcatcagtggtatcagtacaagaggcaggctgatgatctcctgaaatgcttggatgacattgaaaaaaaattagccagcctacctgagcccagagatgaaaggaaaataaaggaaattgatcgggaattgcagaagaagaaagaggagctgaatgcagtgcgtaggcaagctgagggcttgtctgaggatggggccgcaatggcagtggagccaactcagatccagctcagcaagcgctggcgggaaattgagagcaaatttgctcagtttcgaagactcaactttgcacaaattcacactgtccgtgaagaaacgatgatggtgatgactgaagacatgcctttggaaatttcttatgtgccttctacttatttgactgaaatcactcatgtctcacaagccctattagaagtggaacaacttctcaatgctcctgacctctgtgctaaggactttgaagatctctttaagcaagaggagtctctgaagaatataaaagatagtctacaacaaagctcaggtcggattgacattattcatagcaagaagacagcagcattgcaaagtgcaacgcctgtggaaagggtgaagctacaggaagctctctcccagcttgatttccaatgggaaaaagttaacaaaatgtacaaggaccgacaagggcgatttgacagatctgttgagaaatggcggcgttttcattatgatataaagatatttaatcagtggctaacagaagctgaacagtttctcagaaagacacaaattcctgagaattgggaacatgctaaatacaaatggtatcttaaggaactccaggatggcattgggcagcggcaaactgttgtcagaacattgaatgcaactggggaagaaataattcagcaatcctcaaaaacagatgccagtattctacaggaaaaattgggaagcctgaatctgcggtggcaggaggtctgcaaacagctgtcagacagaaaaaagaggctagaagaacaaaagaatatcttgtcagaatttcaaagagatttaaatgaatttgttttatggttggaggaagcagataacattgctagtatcccacttgaacctggaaaagagcagcaactaaaagaaaagcttgagcaagtcaagttactggtggaagagttgcccctgcgccagggaattctcaaacaattaaatgaaactggaggacccgtgcttgtaagtgctcccataagcccagaagagcaagataaacttgaaaataagctcaagcagacaaatctccagtggataaaggtttccagagctttacctgagaaacaaggagaaattgaagctcaaataaaagaccttgggcagcttgaaaaaaagcttgaagaccttgaagagcagttaaatcatctgctgctgtggttatctcctattaggaatcagttggaaatttataaccaaccaaaccaagaaggaccatttgacgttaaggaaactgaaatagcagttcaagctaaacaaccggatgtggaagagattttgtctaaagggcagcatttgtacaaggaaaaaccagccactcagccagtgaagaggaagttagaagatctgagctctgagtggaaggcggtaaaccgtttacttcaagagctgagggcaaagcagcctgacctagctcctggactgaccactattggagcctctcctactcagactgttactctggtgacacaacctgtggttactaaggaaactgccatctccaaactagaaatgccatcttccttgatgttggaggtacctgctctggcagatttcaaccgggcttggacagaacttaccgactggctttctctgcttgatcaagttataaaatcacagagggtgatggtgggtgaccttgaggatatcaacgagatgatcatcaagcagaaggcaacaatgcaggatttggaacagaggcgtccccagttggaagaactcattaccgctgcccaaaatttgaaaaacaagaccagcaatcaagaggctagaacaatcattacggatcgaattgaaagaattcagaatcagtgggatgaagtacaagaacaccttcagaaccggaggcaacagttgaatgaaatgttaaaggattcaacacaatggctggaagctaaggaagaagctgagcaggtcttaggacaggccagagccaagcttgagtcatggaaggagggtccctatacagtagatgcaatccaaaagaaaatcacagaaaccaagcagttggccaaagacctccgccagtggcagacaaatgtagatgtggcaaatgacttggccctgaaacttctccgggattattctgcagatgataccagaaaagtccacatgataacagagaatatcaatgcctcttggagaagcattcataaaagggtgagtgagcgagaggctgctttggaagaaactcatagattactgcaacagttccccctggacctggaaaagtttcttgcctggcttacagaagctgaaacaactgccaatgtcctacaggatgctacccgtaaggaaaggctcctagaagactccaagggagtaaaagagctgatgaaacaatggcaagacctccaaggtgaaattgaagctcacacagatgtttatcacaacctggatgaaaacagccaaaaaatcctgagatccctggaaggttccgatgatgcagtcctgttacaaagacgtttggataacatgaacttcaagtggagtgaacttcggaaaaagtctctcaacattaggtcccatttggaagccagttctgaccagtggaagcgtctgcacctttctctgcaggaacttctggtgtggctacagctgaaagatgatgaattaagccggcaggcacctattggaggcgactttccagcagttcagaagcagaacgatgtacatagggccttcaagagggaattgaaaactaaagaacctgtaatcatgagtactcttgagactgtacgaatatttctgacagagcagcctttggaaggactagagaaactctaccaggagcccagagagctgcctcctgaggagagagcccagaatgtcactcggcttctacgaaagcaggctgaggaggtcaatactgagtgggaaaaattgaacctgcactccgctgactggcagagaaaaatagatgagacccttgaaagactccgggaacttcaagaggccacggatgagctggacctcaagctgcgccaagctgaggtgatcaagggatcctggcagcccgtgggcgatctcctcattgactctctccaagatcacctcgagaaagtcaaggcacttcgaggagaaattgcgcctctgaaagagaacgtgagccacgtcaatgaccttgctcgccagcttaccactttgggcattcagctctcaccgtataacctcagcactctggaagacctgaacaccagatggaagcttctgcaggtggccgtcgaggaccgagtcaggcagctgcatgaagcccacagggactttggtccagcatctcagcactttctttccacgtctgtccagggtccctgggagagagccatctcgccaaacaaagtgccctactatatcaaccacgagactcaaacaacttgctgggaccatcccaaaatgacagagctctaccagtctttagctgacctgaataatgtcagattctcagcttataggactgccatgaaactccgaagactgcagaaggccctttgcttggatctcttgagcctgtcagctgcatgtgatgccttggaccagcacaacctcaagcaaaatgaccagcccatggatatcctgcagattattaattgtttgaccactatttatgaccgcctggagcaagagcacaacaatttggtcaacgtccctctctgcgtggatatgtgtctgaactggctgctgaatgtttatgatacgggacgaacagggaggatccgtgtcctgtcttttaaaactggcatcatttccctgtgtaaagcacatttggaagacaagtacagataccttttcaagcaagtggcaagttcaacaggattttgtgaccagcgcaggctgggcctccttctgcatgattctatccaaattccaagacagttgggtgaagttgcatcctttgggggcagtaacattgagccaagtgtccggagctgcttccaatttgctaataataagccagagatcgaagcggccctcttcctagactggatgagactggaaccccagtccatggtgtggctgcccgtcctgcacagagtggctgctgcagaaactgccaagcatcaggccaaatgtaacatctgcaaagagtgtccaatcattggattcaggtacaggagtctaaagcactttaattatgacatctgccaaagctgctttttttctggtcgagttgcaaaaggccataaaatgcactatcccatggtggaatattgcactccgactacatcaggagaagatgttcgagactttgccaaggtactaaaaaacaaatttcgaaccaaaaggtattttgcgaagcatccccgaatgggctacctgccagtgcagactgtcttagagggggacaacatggaaacgaatctgcaagcagaatatgaccgtctaaagcagcagcacgaacataaaggcctgtccccactgccgtcccctcctgaaatgatgcccacctctccccagagtccccgggatgctgagctcattgctgaggccaagctactgcgtcaacacaaaggccgcctggaagccaggatgcaaatcctggaagaccacaataaacagctggagtcacagttacacaggctaaggcagctgctggagcaaccccaggcagaggccaaagtgaatggcacaacggtgtcctctccttctacctctctacagaggtccgacagcagtcagcctatgctgctccgagtggttggcagtcaaacttcggactccatgggtgaggaagatcttctcagtcctccccaggacacaagcacagggttagaggaggtgatggagcaactcaacaactccttccctagttcaagaggacacaatgtaggaagtcttttccacatggcagatgatttgggcagagcgatggagtccttagtatcagtcatgacagatgaagaaggagcagaataaatgttttacaactcctgattcccgcatggtttttataatattcatacaacaaagaggattagacagtaagagtttacaagaaataaatctatatttttgtgaagggtagtggtattatactgtagatttcagtagtttctaagtctgttattgttttgttaacaatggcaggttttacacgtctatgcaattgtacaaaaaagttataagaaaactacatgtaaaatcttgatagctaaataacttgccatttctttatatggaacgcattttgggttgtttaaaaatttataacagttataaagaaagattgtaaactaaagtgtgctttataaaaaaaagttgtttataaaaacccctaaaaacaaaacaaacacacacacacacacatacacacacacacacaaaactttgaggcagcgcattgttttgcatccttttggcgtgatatccatatgaaattcatggctttttctttttttgcatattaaagataagacttcctctaccaccacaccaaatgactactacacactgctcatttgagaactgtcagctgagtggggcaggcttgagttttcatttcatatatctatatgtctataagtatataaatactatagttatatagataaagagatacgaatttctatagactgactttttccattttttaaatgttcatgtcacatcctaatagaaagaaattacttctagtcagtcatccaggcttacctgcttggtctagaatggatttttcccggagccggaagccaggaggaaactacaccacactaaaacattgtctacagctccagatgtttctcattttaaacaactttccactgacaacgaaagtaaagtaaagtattggatttttttaaagggaacatgtgaatgaatacacaggacttattatatcagagtgagtaatcggttggttggttgattgattgattgattgatacattcagcttcctgctgctagcaatgccacgatttagatttaatgatgcttcagtggaaatcaatcagaaggtattctgaccttgtgaacatcagaaggtattttttaactcccaagcagtagcaggacgatgatagggctggagggctatggattcccagcccatccctgtgaaggagtaggccactctttaagtgaaggattggatgattgttcataatacataaagttctctgtaattacaactaaattattatgccctcttctcacagtcaaaaggaactgggtggtttggtttttgttgcttttttagatttattgtcccatgtgggatgagtttttaaatgccacaagacataatttaaaataaataaactttgggaaaaggtgtaaaacagtagccccatcacatttgtgatactgacaggtatcaacccagaagcccatgaactgtgtttccatcctttgcatttctctgcgagtagttccacacaggtttgtaagtaagtaagaaagaaggcaaattgattcaaatgttacaaaaaaacccttcttggtggattagacaggttaaatatataaacaaacaaacaaaaattgctcaaaaaagaggagaaaagctcaagaggaaaagctaaggactggtaggaaaaagctttactctttcatgccattttatttctttttgatttttaaatcattcattcaatagataccaccgtgtgacctataattttgcaaatctgttacctctgacatcaagtgtaattagcttttggagagtgggctgacatcaagtgtaattagcttttggagagtgggttttgtccattattaataattaattaattaacatcaaacacggcttctcatgctatttctacctcactttggttttggggtgttcctgataattgtgcacacctgagttcacagcttcaccacttgtccattgcgttattttctttttcctttataattctttctttttccttcataattttcaaaagaaaacccaaagctctaaggtaacaaattaccaaattacatgaagatttggtttttgtcttgcatttttttcctttatgtgacgctggaccttttcttta

SEQ ID NO: 55 - protein, 3593 aa, Homo sapiens
MLWWEEVEDCYEREDVQKKTFTKWVNAQFSKFGKQHIENLFSDLQDGRRLLDLLEGLTGQKLPKEKGSTRVHALNNVNKALRVLQNNNVDLVNIGSTDIVDGNHKLTLGLIWNIILHWQVKNVMKNIMAGLQQTNSEKILLSWVRQSTRNYPQVNVINFTTSWSDGLALNALIHSHRPDLFDWNSVVCQQSATQRLEHAFNIARYQLGIEKLLDPEDVDTTYPDKKSILMYITSLFQVLPQQVSIEAIQEVEMLPRPPKVTKEEHFQLHHQMHYSQQITVSLAQGYERTSSPKPRFKSYAYTQAAYVTTSDPTRSPFPSQHLEAPEDKSFGSSLMESEVNLDRYQTALEEVLSWLLSAEDTLQAQGEISNDVEVVKDQFHTHEGYMMDLTAHQGRVGNILQLGSKLIGTGKLSEDEETEVQEQMNLLNSRWECLRVASMEKQSNLHRVLMDLQNQKLKELNDWLTKTEERTRKMEEEPLGPDLEDLKRQVQQHKVLQEDLEQEQVRVNSLTHMVVVVDESSGDHATAALEEQLKVLGDRWANICRWTEDRWVLLQDILLKWQRLTEEQCLFSAWLSEKEDAVNKIHTTGFKDQNEMLSSLQKLAVLKADLEKKKQSMGKLYSLKQDLLSTLKNKSVTQKTEAWLDNFARCWDNLVQKLEKSTAQISQAVTTTQPSLTQTTVMETVTTVTTREQILVKHAQEELPPPPPQKKRQITVDSEIRKRLDVDITELHSWITRSEAVLQSPEFAIFRKEGNFSDLKEKVNAIEREKAEKFRKLQDASRSAQALVEQMVNEGVNADSIKQASEQLNSRWIEFCQLLSERLNWLEYQNNIIAFYNQLQQLEQMTTTAENWLKIQPTTPSEPTAIKSQLKICKDEVNRLSDLQPQIERLKIQSIALKEKGQGPMFLDADFVAFTNHFKQVFSDVQAREKELQTIFDTLPPMRYQETMSAIRTWVQQSETKLSIPQLSVTDYEIMEQRLGELQALQSSLQEQQSGLYYLSTTVKEMSKKAPSEISRKYQSEFEEIEGRWKKLSSQLVEHCQKLEEQMNKLRKIQNHIQTLKKWMAEVDVFLKEEWPALGDSEILKKQLKQCRLLVSDIQTIQPSLNSVNEGGQKIKNEAEPEFASRLETELKELNTQWDHMCQQVYARKEALKGGLEKTVSLQKDLSEMHEWMTQAEEEYLERDFEYKTPDELQKAVEEMKRAKEEAQQKEAKVKLLTESVNSVIAQAPPVAQEALKKELETLTTNYQWLCTRLNGKCKTLEEVWACWHELLSYLEKANKWLNEVEFKLKTTENIPGGAEEISEVLDSLENLMRHSEDNPNQIRILAQTLTDGGVMDELINEELETFNSRWRELHEEAVRRQKLLEQSIQSAQETEKSLHLIQESLTFIDKQLAAYIADKVDAAQMPQEAQKIQSDLTSHEISLEEMKKHNQGKEAAQRVLSQIDVAQKKLQDVSMKFRLFQKPANFEQRLQESKMILDEVKMHLPALETKSVEQEVVQSQLNHCVNLYKSLSEVKSEVEMVIKTGRQIVQKKQTENPKELDERVTALKLHYNELGAKVTERKQQLEKCLKLSRKMRKEMNVLTEWLAATDMELTKRSAVEGMPSNLDSEVAWGKATQKEIEKQKVHLKSITEVGEALKTVLGKKETLVEDKLSLLNSNWIAVTSRAEEWLNLLLEYQKHMETFDQNVDHITKWIIQADTLLDESEKKKPQQKEDVLKRLKAELNDIRPKVDSTRDQAANLMANRGDHCRKLVEPQISELNHRFAAISHRIKTGKASIPLKELEQFNSDIQKLLEPLEAEIQQGVNLKEEDFNKDMNEDNEGTVKELLQRGDNLQQRITDERKREEIKIKQQLLQTKHNALKDLRSQRRKKALEISHQWYQYKRQADDLLKCLDDIEKKLASLPEPRDERKIKEIDRELQKKKEELNAVRRQAEGLSEDGAAMAVEPTQIQLSKRWREIESKFAQFRRLNFAQIHTVREETMMVMTEDMPLEISYVPSTYLTEITHVSQALLEVEQLLNAPDLCAKDFEDLFKQEESLKNIKDSLQQSSGRIDIIHSKKTAALQSATPVERVKLQEALSQLDFQWEKVNKMYKDRQGRFDRSVEKWRRFHYDIKIFNQWLTEAEQFLRKTQIPENWEHAKYKWYLKELQDGIGQRQTVVRTLNATGEEIIQQSSKTDASILQEKLGSLNLRWQEVCKQLSDRKKRLEEQKNILSEFQRDLNEFVLWLEEADNIASIPLEPGKEQQLKEKLEQVKLLVEELPLRQGILKQLNETGGPVLVSAPISPEEQDKLENKLKQTNLQWIKVSRALPEKQGEIEAQIKDLGQLEKKLEDLEEQLNHLLLWLSPIRNQLEIYNQPNQEGPFDVKETEIAVQAKQPDVEEILSKGQHLYKEKPATQPVKRKLEDLSSEWKAVNRLLQELRAKQPDLAPGLTTIGASPTQTVTLVTQPVVTKETAISKLEMPSSLMLEVPALADFNRAWTELTDWLSLLDQVIKSQRVMVGDLEDINEMIIKQKATMQDLEQRRPQLEELITAAQNLKNKTSNQEARTIITDRIERIQNQWDEVQEHLQNRRQQLNEMLKDSTQWLEAKEEAEQVLGQARAKLESWKEGPYTVDAIQKKITETKQLAKDLRQWQTNVDVANDLALKLLRDYSADDTRKVHMITENINASWRSIHKRVSEREAALEETHRLLQQFPLDLEKFLAWLTEAETTANVLQDATRKERLLEDSKGVKELMKQWQDLQGEIEAHTDVYHNLDENSQKILRSLEGSDDAVLLQRRLDNMNFKWSELRKKSLNIRSHLEASSDQWKRLHLSLQELLVWLQLKDDELSRQAPIGGDFPAVQKQNDVHRAFKRELKTKEPVIMSTLETVRIFLTEQPLEGLEKLYQEPRELPPEERAQNVTRLLRKQAEEVNTEWEKLNLHSADWQRKIDETLERLRELQEATDELDLKLRQAEVIKGSWQPVGDLLIDSLQDHLEKVKALRGEIAPLKENVSHVNDLARQLTTLGIQLSPYNLSTLEDLNTRWKLLQVAVEDRVRQLHEAHRDFGPASQHFLSTSVQGPWERAISPNKVPYYINHETQTTCWDHPKMTELYQSLADLNNVRFSAYRTAMKLRRLQKALCLDLLSLSAACDALDQHNLKQNDQPMDILQIINCLTTIYDRLEQEHNNLVNVPLCVDMCLNWLLNVYDTGRTGRIRVLSFKTGIISLCKAHLEDKYRYLFKQVASSTGFCDQRRLGLLLHDSIQIPRQLGEVASFGGSNIEPSVRSCFQFANNKPEIEAALFLDWMRLEPQSMVWLPVLHRVAAAETAKHQAKCNICKECPIIGFRYRSLKHFNYDICQSCFFSGRVAKGHKMHYPMVEYCTPTTSGEDVRDFAKVLKNKFRTKRYFAKHPRMGYLPVQTVLEGDNMETNLQAEYDRLKQQHEHKGLSPLPSPPEMMPTSPQSPRDAELIAEAKLLRQHKGRLEARMQILEDHNKQLESQLHRLRQLLEQPQAEAKVNGTTVSSPSTSLQRSDSSQPMLLRVVGSQTSDSMGEEDLLSPPQDTSTGLEEVMEQLNNSFPSSRGHNVGSLFHMADDLGRAMESLVSVMTDEEGAE

SEQ ID NO: 56 - DNA, 11474 bp, Homo sapiens
actttccccctacaggactcagatctgggaggcaattaccttcggagaaaaacgaataggaaaaactgaagtgttactttttttaaagctgctgaagtttgttggtttctcattgtttttaagcctactggagcaataaagtttgaagaacttttaccaggttttttttatcgctgccttgatatacacttttcaaaatgctttggtgggaagaagtagaggactgttatgaaagagaagatgttcaaaagaaaacattcacaaaatgggtaaatgcacaattttctaagtttgggaagcagcatattgagaacctcttcagtgacctacaggatgggaggcgcctcctagacctcctcgaaggcctgacagggcaaaaactgccaaaagaaaaaggatccacaagagttcatgccctgaacaatgtcaacaaggcactgcgggttttgcagaacaataatgttgatttagtgaatattggaagtactgacatcgtagatggaaatcataaactgactcttggtttgatttggaatataatcctccactggcaggtcaaaaatgtaatgaaaaatatcatggctggattgcaacaaaccaacagtgaaaagattctcctgagctgggtccgacaatcaactcgtaattatccacaggttaatgtaatcaacttcaccaccagctggtctgatggcctggctttgaatgctctcatccatagtcataggccagacctatttgactggaatagtgtggtttgccagcagtcagccacacaacgactggaacatgcattcaacatcgccagatatcaattaggcatagagaaactactcgatcctgaagatgttgataccacctatccagataagaagtccatcttaatgtacatcacatcactcttccaagttttgcctcaacaagtgagcattgaagccatccaggaagtggaaatgttgccaaggccacctaaagtgactaaagaagaacattttcagttacatcatcaaatgcactattctcaacagatcacggtcagtctagcacagggatatgagagaacttcttcccctaagcctcgattcaagagctatgcctacacacaggctgcttatgtcaccacctctgaccctacacggagcccatttccttcacagcatttggaagctcctgaagacaagtcatttggcagttcattgatggagagtgaagtaaacctggaccgttatcaaacagctttagaagaagtattatcgtggcttctttctgctgaggacacattgcaagcacaaggagagatttctaatgatgtggaagtggtgaaagaccagtttcatactcatgaggggtacatgatggatttgacagcccatcagggccgggttggtaatattctacaattgggaagtaagctgattggaacaggaaaattatcagaagatgaagaaactgaagtacaagagcagatgaatctcctaaattcaagatgggaatgcctcagggtagctagcatggaaaaacaaagcaatttacatagagttttaatggatctccagaatcagaaactgaaagagttgaatgactggctaacaaaaacagaagaaagaacaaggaaaatggaggaagagcctcttggacctgatcttgaagacctaaaacgccaagtacaacaacataaggtgcttcaagaagatctagaacaagaacaagtcagggtcaattctctcactcacatggtggtggtagttgatgaatctagtggagatcacgcaactgctgctttggaagaacaacttaaggtattgggagatcgatgggcaaacatctgtagatggacagaagaccgctgggttcttttacaagacatccttctcaaatggcaacgtcttactgaagaacagtgcctttttagtgcatggctttcagaaaaagaagatgcagtgaacaagattcacacaactggctttaaagatcaaaatgaaatgttatcaagtcttcaaaaactggccgttttaaaagcggatctagaaaagaaaaagcaatccatgggcaaactgtattcactcaaacaagatcttctttcaacactgaagaataagtcagtgacccagaagacggaagcatggctggataactttgcccggtgttgggataatttagtccaaaaacttgaaaagagtacagcacagatttcacaggctgtcaccaccactcagccatcactaacacagacaactgtaatggaaacagtaactacggtgaccacaagggaacagatcctggtaaagcatgctcaagaggaacttccaccaccacctccccaaaagaagaggcagattactgtggattctgaaattaggaaaaggttggatgttgatataactgaacttcacagctggattactcgctcagaagctgtgttgcagagtcctgaatttgcaatctttcggaaggaaggcaacttctcagacttaaaagaaaaagtcaatgccatagagcgagaaaaagctgagaagttcagaaaactgcaagatgccagcagatcagctcaggccctggtggaacagatggtgaatgagggtgttaatgcagatagcatcaaacaagcctcagaacaactgaacagccggtggatcgaattctgccagttgctaagtgagagacttaactggctggagtatcagaacaacatcatcgctttctataatcagctacaacaattggagcagatgacaactactgctgaaaactggttgaaaatccaacccaccaccccatcagagccaacagcaattaaaagtcagttaaaaatttgtaaggatgaagtcaaccggctatcagatcttcaacctcaaattgaacgattaaaaattcaaagcatagccctgaaagagaaaggacaaggacccatgttcctggatgcagactttgtggcctttacaaatcattttaagcaagtcttttctgatgtgcaggccagagagaaagagctacagacaatttttgacactttgccaccaatgcgctatcaggagaccatgagtgccatcaggacatgggtccagcagtcagaaaccaaactctccatacctcaacttagtgtcaccgactatgaaatcatggagcagagactcggggaattgcaggctttacaaagttctctgcaagagcaacaaagtggcctatactatctcagcaccactgtgaaagagatgtcgaagaaagcgccctctgaaattagccggaaatatcaatcagaatttgaagaaattgagggacgctggaagaagctctcctcccagctggttgagcattgtcaaaagctagaggagcaaatgaataaactccgaaaaattcagaatcacatacaaaccctgaagaaatggatggctgaagttgatgtttttctgaaggaggaatggcctgcccttggggattcagaaattctaaaaaagcagctgaaacagtgcagacttttagtcagtgatattcagacaattcagcccagtctaaacagtgtcaatgaaggtgggcagaagataaagaatgaagcagagccagagtttgcttcgagacttgagacagaactcaaagaacttaacactcagtgggatcacatgtgccaacaggtctatgccagaaaggaggccttgaagggaggtttggagaaaactgtaagcctccagaaagatctatcagagatgcacgaatggatgacacaagctgaagaagagtatcttgagagagattttgaatataaaactccagatgaattacagaaagcagttgaagagatgaagagagctaaagaagaggcccaacaaaaagaagcgaaagtgaaactccttactgagtctgtaaatagtgtcatagctcaagctccacctgtagcacaagaggccttaaaaaaggaacttgaaactctaaccaccaactaccagtggctctgcactaggctgaatgggaaatgcaagactttggaagaagtttgggcatgttggcatgagttattgtcatacttggagaaagcaaacaagtggctaaatgaagtagaatttaaacttaaaaccactgaaaacattcctggcggagctgaggaaatctctgaggtgctagattcacttgaaaatttgatgcgacattcagaggataacccaaatcagattcgcatattggcacagaccctaacagatggcggagtcatggatgagctaatcaatgaggaacttgagacatttaattctcgttggagggaactacatgaagaggctgtaaggaggcaaaagttgcttgaacagagcatccagtctgcccaggagactgaaaaatccttacacttaatccaggagtccctcacattcattgacaagcagttggcagcttatattgcagacaaggtggacgcagctcaaatgcctcaggaagcccagaaaatccaatctgatttgacaagtcatgagatcagtttagaagaaatgaagaaacataatcaggggaaggaggctgcccaaagagtcctgtctcagattgatgttgcacagaaaaaattacaagatgtctccatgaagtttcgattattccagaaaccagccaattttgagcagcgtctacaagaaagtaagatgattttagatgaagtgaagatgcacttgcctgcattggaaacaaagagtgtggaacaggaagtagtacagtcacagctaaatcattgtgtgaacttgtataaaagtctgagtgaagtgaagtctgaagtggaaatggtgataaagactggacgtcagattgtacagaaaaagcagacggaaaatcccaaagaacttgatgaaagagtaacagctttgaaattgcattataatgagctgggagcaaaggtaacagaaagaaagcaacagttggagaaatgcttgaaattgtcccgtaagatgcgaaaggaaatgaatgtcttgacagaatggctggcagctacagatatggaattgacaaagagatcagcagttgaaggaatgcctagtaatttggattctgaagttgcctggggaaaggctactcaaaaagagattgagaaacagaaggtgcacctgaagagtatcacagaggtaggagaggccttgaaaacagttttgggcaagaaggagacgttggtggaagataaactcagtcttctgaatagtaactggatagctgtcacctcccgagcagaagagtggttaaatcttttgttggaataccagaaacacatggaaacttttgaccagaatgtggaccacatcacaaagtggatcattcaggctgacacacttttggatgaatcagagaaaaagaaaccccagcaaaaagaagacgtgcttaagcgtttaaaggcagaactgaatgacatacgcccaaaggtggactctacacgtgaccaagcagcaaacttgatggcaaaccgcggtgaccactgcaggaaattagtagagccccaaatctcagagctcaaccatcgatttgcagccatttcacacagaattaagactggaaaggcctccattcctttgaaggaattggagcagtttaactcagatatacaaaaattgcttgaaccactggaggctgaaattcagcagggggtgaatctgaaagaggaagacttcaataaagatatgaatgaagacaatgagggtactgtaaaagaattgttgcaaagaggagacaacttacaacaaagaatcacagatgagagaaagcgagaggaaataaagataaaacagcagctgttacagacaaaacataatgctctcaaggatttgaggtctcaaagaagaaaaaaggctctagaaatttctcatcagtggtatcagtacaagaggcaggctgatgatctcctgaaatgcttggatgacattgaaaaaaaattagccagcctacctgagcccagagatgaaaggaaaataaaggaaattgatcgggaattgcagaagaagaaagaggagctgaatgcagtgcgtaggcaagctgagggcttgtctgaggatggggccgcaatggcagtggagccaactcagatccagctcagcaagcgctggcgggaaattgagagcaaatttgctcagtttcgaagactcaactttgcacaaattcacactgtccgtgaagaaacgatgatggtgatgactgaagacatgcctttggaaatttcttatgtgccttctacttatttgactgaaatcactcatgtctcacaagccctattagaagtggaacaacttctcaatgctcctgacctctgtgctaaggactttgaagatctctttaagcaagaggagtctctgaagaatataaaagatagtctacaacaaagctcaggtcggattgacattattcatagcaagaagacagcagcattgcaaagtgcaacgcctgtggaaagggtgaagctacaggaagctctctcccagcttgatttccaatgggaaaaagttaacaaaatgtacaaggaccgacaagggcgatttgacagatctgttgagaaatggcggcgttttcattatgatataaagatatttaatcagtggctaacagaagctgaacagtttctcagaaagacacaaattcctgagaattgggaacatgctaaatacaaatggtatcttaaggaactccaggatggcattgggcagcggcaaactgttgtcagaacattgaatgcaactggggaagaaataattcagcaatcctcaaaaacagatgccagtattctacaggaaaaattgggaagcctgaatctgcggtggcaggaggtctgcaaacagctgtcagacagaaaaaagaggctagaagaacaaaagaatatcttgtcagaatttcaaagagatttaaatgaatttgttttatggttggaggaagcagataacattgctagtatcccacttgaacctggaaaagagcagcaactaaaagaaaagcttgagcaagtcaagttactggtggaagagttgcccctgcgccagggaattctcaaacaattaaatgaaactggaggacccgtgcttgtaagtgctcccataagcccagaagagcaagataaacttgaaaataagctcaagcagacaaatctccagtggataaaggtttccagagctttacctgagaaacaaggagaaattgaagctcaaataaaagaccttgggcagcttgaaaaaaagcttgaagaccttgaagagcagttaaatcatctgctgctgtggttatctcctattaggaatcagttggaaatttataaccaaccaaaccaagaaggaccatttgacgttaaggaaactgaaatagcagttcaagctaaacaaccggatgtggaagagattttgtctaaagggcagcatttgtacaaggaaaaaccagccactcagccagtgaagaggaagttagaagatctgagctctgagtggaaggcggtaaaccgtttacttcaagagctgagggcaaagcagcctgacctagctcctggactgaccactattggagcctctcctactcagactgttactctggtgacacaacctgtggttactaaggaaactgccatctccaaactagaaatgccatcttccttgatgttggaggtacctgctctggcagatttcaaccgggcttggacagaacttaccgactggctttctctgcttgatcaagttataaaatcacagagggtgatggtgggtgaccttgaggatatcaacgagatgatcatcaagcagaaggcaacaatgcaggatttggaacagaggcgtccccagttggaagaactcattaccgctgcccaaaatttgaaaaacaagaccagcaatcaagaggctagaacaatcattacggatcgaattgaaagaattcagaatcagtgggatgaagtacaagaacaccttcagaaccggaggcaacagttgaatgaaatgttaaaggattcaacacaatggctggaagctaaggaagaagctgagcaggtcttaggacaggccagagccaagcttgagtcatggaaggagggtccctatacagtagatgcaatccaaaagaaaatcacagaaaccaagcagttggccaaagacctccgccagtggcagacaaatgtagatgtggcaaatgacttggccctgaaacttctccgggattattctgcagatgataccagaaaagtccacatgataacagagaatatcaatgcctcttggagaagcattcataaaagggtgagtgagcgagaggctgctttggaagaaactcatagattactgcaacagttccccctggacctggaaaagtttcttgcctggcttacagaagctgaaacaactgccaatgtcctacaggatgctacccgtaaggaaaggctcctagaagactccaagggagtaaaagagctgatgaaacaatggcaagacctccaaggtgaaattgaagctcacacagatgtttatcacaacctggatgaaaacagccaaaaaatcctgagatccctggaaggttccgatgatgcagtcctgttacaaagacgtttggataacatgaacttcaagtggagtgaacttcggaaaaagtctctcaacattaggtcccatttggaagccagttctgaccagtggaagcgtctgcacctttctctgcaggaacttctggtgtggctacagctgaaagatgatgaattaagccggcaggcacctattggaggcgactttccagcagttcagaagcagaacgatgtacatagggccttcaagagggaattgaaaactaaagaacctgtaatcatgagtactcttgagactgtacgaatatttctgacagagcagcctttggaaggactagagaaactctaccaggagcccagagagctgcctcctgaggagagagcccagaatgtcactcggcttctacgaaagcaggctgaggaggtcaatactgagtgggaaaaattgaacctgcactccgctgactggcagagaaaaatagatgagacccttgaaagactccgggaacttcaagaggccacggatgagctggacctcaagctgcgccaagctgaggtgatcaagggatcctggcagcccgtgggcgatctcctcattgactctctccaagatcacctcgagaaagtcaaggcacttcgaggagaaattgcgcctctgaaagagaacgtgagccacgtcaatgaccttgctcgccagcttaccactttgggcattcagctctcaccgtataacctcagcactctggaagacctgaacaccagatggaagcttctgcaggtggccgtcgaggaccgagtcaggcagctgcatgaagcccacagggactttggtccagcatctcagcactttctttccacgtctgtccagggtccctgggagagagccatctcgccaaacaaagtgccctactatatcaaccacgagactcaaacaacttgctgggaccatcccaaaatgacagagctctaccagtctttagctgacctgaataatgtcagattctcagcttataggactgccatgaaactccgaagactgcagaaggccctttgcttggatctcttgagcctgtcagctgcatgtgatgccttggaccagcacaacctcaagcaaaatgaccagcccatggatatcctgcagattattaattgtttgaccactatttatgaccgcctggagcaagagcacaacaatttggtcaacgtccctctctgcgtggatatgtgtctgaactggctgctgaatgtttatgatacgggacgaacagggaggatccgtgtcctgtcttttaaaactggcatcatttccctgtgtaaagcacatttggaagacaagtacagataccttttcaagcaagtggcaagttcaacaggattttgtgaccagcgcaggctgggcctccttctgcatgattctatccaaattccaagacagttgggtgaagttgcatcctttgggggcagtaacattgagccaagtgtccggagctgcttccaattttcccaatctctggaaaccacagctctgttttctgttcctgtaattttgccttttcctgaactggattttaaaggattgtaggaggcagtagtggaagagctaactttatatcttgttcttttacataatgcgccctgatccacacttgggaaagtatattccatggtacctatagacagatatatgtgctttaccatgtatatgtgaaacttttctaatttaactttcctgttaaattagaactcggtagcataaattaatactgttgagtatacttagggatttgcatagatttaaaattgtgcatatgttccctagggccatggcgttaattggtttattagtcaggtggagtgcagagcctgaggtcaggacagttgtccttgaacatggaaatgaagagtggataatcaccatgtgttattgtttgggctgattttatctttaatgggtgattcagagtcctgattaatatttagagcagtgactgctggcctcctacctgctcattatcttcagaactttaaataaaatacttgatttctacccaagatggtagttatgggaagccttttacttcttcttgtctcacaaagacaactcttgacctctcaatccttaaacaaaaagttctgcttctgcgcatgtggggactcttaaactcattttcatgcctggagattcacatttagggatctaggaaaagcacatctaggcagagtcgatgaggagatgctttaagaaccgtgacaaggacaggaaggaaatcaattttgcgttaggtttgtatttttagagaaaacgaatcctggggaacttttcacactcattactattgacattaataccattgtcctgtccctttcacagttactaaaatcactcttgcccaccctcctgccttgcccacaacctattcccatgaaggggtgacttgggagaaataacggtttccaaccaacgttttattttggaaacatttcaagcacaaagagtagttgaaaggatagtctaaagaacactcatctgtgtcatacatctgttcaatccatggttgcttttcgctctacttacctcctccaccctctcagctctgtttatgtatgtgtctgtctgtgtacatacacacacaaacacattttcccctatgccatttaaaagtaaaggagcatcacaacataaacccctaaacacttcaccatacaccattttcttaaaggatgacattctctaacataactgcaatgctatcgttacacacaaatttaacagcaatccagcaataccctctgatatgcagtccacactgaactttccccagtgccccagaattgttccttatagccactgttttcttccagcatctagtcaaggtttttgtctgtcatgtctctgtaccttcatttagttttgaacagtctcccagcattttgttttcctttcatgacattgacttttttggtaggggga

SEQ ID NO: 57 - protein, 3295 aa, Homo sapiens
MLWWEEVEDCYEREDVQKKTFTKWVNAQFSKFGKQHIENLFSDLQDGRRLLDLLEGLTGQKLPKEKGSTRVHALNNVNKALRVLQNNNVDLVNIGSTDIVDGNHKLTLGLIWNIILHWQVKNVMKNIMAGLQQTNSEKILLSWVRQSTRNYPQVNVINFTTSWSDGLALNALIHSHRPDLFDWNSVVCQQSATQRLEHAFNIARYQLGIEKLLDPEDVDTTYPDKKSILMYITSLFQVLPQQVSIEAIQEVEMLPRPPKVTKEEHFQLHHQMHYSQQITVSLAQGYERTSSPKPRFKSYAYTQAAYVTTSDPTRSPFPSQHLEAPEDKSFGSSLMESEVNLDRYQTALEEVLSWLLSAEDTLQAQGEISNDVEVVKDQFHTHEGYMMDLTAHQGRVGNILQLGSKLIGTGKLSEDEETEVQEQMNLLNSRWECLRVASMEKQSNLHRVLMDLQNQKLKELNDWLTKTEERTRKMEEEPLGPDLEDLKRQVQQHKVLQEDLEQEQVRVNSLTHMVVVVDESSGDHATAALEEQLKVLGDRWANICRWTEDRWVLLQDILLKWQRLTEEQCLFSAWLSEKEDAVNKIHTTGFKDQNEMLSSLQKLAVLKADLEKKKQSMGKLYSLKQDLLSTLKNKSVTQKTEAWLDNFARCWDNLVQKLEKSTAQISQAVTTTQPSLTQTTVMETVTTVTTREQILVKHAQEELPPPPPQKKRQITVDSEIRKRLDVDITELHSWITRSEAVLQSPEFAIFRKEGNFSDLKEKVNAIEREKAEKFRKLQDASRSAQALVEQMVNEGVNADSIKQASEQLNSRWIEFCQLLSERLNWLEYQNNIIAFYNQLQQLEQMTTTAENWLKIQPTTPSEPTAIKSQLKICKDEVNRLSDLQPQIERLKIQSIALKEKGQGPMFLDADFVAFTNHFKQVFSDVQAREKELQTIFDTLPPMRYQETMSAIRTWVQQSETKLSIPQLSVTDYEIMEQRLGELQALQSSLQEQQSGLYYLSTTVKEMSKKAPSEISRKYQSEFEEIEGRWKKLSSQLVEHCQKLEEQMNKLRKIQNHIQTLKKWMAEVDVFLKEEWPALGDSEILKKQLKQCRLLVSDIQTIQPSLNSVNEGGQKIKNEAEPEFASRLETELKELNTQWDHMCQQVYARKEALKGGLEKTVSLQKDLSEMHEWMTQAEEEYLERDFEYKTPDELQKAVEEMKRAKEEAQQKEAKVKLLTESVNSVIAQAPPVAQEALKKELETLTTNYQWLCTRLNGKCKTLEEVWACWHELLSYLEKANKWLNEVEFKLKTTENIPGGAEEISEVLDSLENLMRHSEDNPNQIRILAQTLTDGGVMDELINEELETFNSRWRELHEEAVRRQKLLEQSIQSAQETEKSLHLIQESLTFIDKQLAAYIADKVDAAQMPQEAQKIQSDLTSHEISLEEMKKHNQGKEAAQRVLSQIDVAQKKLQDVSMKFRLFQKPANFEQRLQESKMILDEVKMHLPALETKSVEQEVVQSQLNHCVNLYKSLSEVKSEVEMVIKTGRQIVQKKQTENPKELDERVTALKLHYNELGAKVTERKQQLEKCLKLSRKMRKEMNVLTEWLAATDMELTKRSAVEGMPSNLDSEVAWGKATQKEIEKQKVHLKSITEVGEALKTVLGKKETLVEDKLSLLNSNWIAVTSRAEEWLNLLLEYQKHMETFDQNVDHITKWIIQADTLLDESEKKKPQQKEDVLKRLKAELNDIRPKVDSTRDQAANLMANRGDHCRKLVEPQISELNHRFAAISHRIKTGKASIPLKELEQFNSDIQKLLEPLEAEIQQGVNLKEEDFNKDMNEDNEGTVKELLQRGDNLQQRITDERKREEIKIKQQLLQTKHNALKDLRSQRRKKALEISHQWYQYKRQADDLLKCLDDIEKKLASLPEPRDERKIKEIDRELQKKKEELNAVRRQAEGLSEDGAAMAVEPTQIQLSKRWREIESKFAQFRRLNFAQIHTVREETMMVMTEDMPLEISYVPSTYLTEITHVSQALLEVEQLLNAPDLCAKDFEDLFKQEESLKNIKDSLQQSSGRIDIIHSKKTAALQSATPVERVKLQEALSQLDFQWEKVNKMYKDRQGRFDRSVEKWRRFHYDIKIFNQWLTEAEQFLRKTQIPENWEHAKYKWYLKELQDGIGQRQTVVRTLNATGEEIIQQSSKTDASILQEKLGSLNLRWQEVCKQLSDRKKRLEEQKNILSEFQRDLNEFVLWLEEADNIASIPLEPGKEQQLKEKLEQVKLLVEELPLRQGILKQLNETGGPVLVSAPISPEEQDKLENKLKQTNLQWIKVSRALPEKQGEIEAQIKDLGQLEKKLEDLEEQLNHLLLWLSPIRNQLEIYNQPNQEGPFDVKETEIAVQAKQPDVEEILSKGQHLYKEKPATQPVKRKLEDLSSEWKAVNRLLQELRAKQPDLAPGLTTIGASPTQTVTLVTQPVVTKETAISKLEMPSSLMLEVPALADFNRAWTELTDWLSLLDQVIKSQRVMVGDLEDINEMIIKQKATMQDLEQRRPQLEELITAAQNLKNKTSNQEARTIITDRIERIQNQWDEVQEHLQNRRQQLNEMLKDSTQWLEAKEEAEQVLGQARAKLESWKEGPYTVDAIQKKITETKQLAKDLRQWQTNVDVANDLALKLLRDYSADDTRKVHMITENINASWRSIHKRVSEREAALEETHRLLQQFPLDLEKFLAWLTEAETTANVLQDATRKERLLEDSKGVKELMKQWQDLQGEIEAHTDVYHNLDENSQKILRSLEGSDDAVLLQRRLDNMNFKWSELRKKSLNIRSHLEASSDQWKRLHLSLQELLVWLQLKDDELSRQAPIGGDFPAVQKQNDVHRAFKRELKTKEPVIMSTLETVRIFLTEQPLEGLEKLYQEPRELPPEERAQNVTRLLRKQAEEVNTEWEKLNLHSADWQRKIDETLERLRELQEATDELDLKLRQAEVIKGSWQPVGDLLIDSLQDHLEKVKALRGEIAPLKENVSHVNDLARQLTTLGIQLSPYNLSTLEDLNTRWKLLQVAVEDRVRQLHEAHRDFGPASQHFLSTSVQGPWERAISPNKVPYYINHETQTTCWDHPKMTELYQSLADLNNVRFSAYRTAMKLRRLQKALCLDLLSLSAACDALDQHNLKQNDQPMDILQIINCLTTIYDRLEQEHNNLVNVPLCVDMCLNWLLNVYDTGRTGRIRVLSFKTGIISLCKAHLEDKYRYLFKQVASSTGFCDQRRLGLLLHDSIQIPRQLGEVASFGGSNIEPSVRSCFQFSQSLETTALFSVPVILPFPELDFKGL

SEQ ID NO: 58 - DNA, 10795 bp, Homo sapiens
actttccccctacaggactcagatctgggaggcaattaccttcggagaaaaacgaataggaaaaactgaagtgttactttttttaaagctgctgaagtttgttggtttctcattgtttttaagcctactggagcaataaagtttgaagaacttttaccaggttttttttatcgctgccttgatatacacttttcaaaatgctttggtgggaagaagtagaggactgttatgaaagagaagatgttcaaaagaaaacattcacaaaatgggtaaatgcacaattttctaagtttgggaagcagcatattgagaacctcttcagtgacctacaggatgggaggcgcctcctagacctcctcgaaggcctgacagggcaaaaactgccaaaagaaaaaggatccacaagagttcatgccctgaacaatgtcaacaaggcactgcgggttttgcagaacaataatgttgatttagtgaatattggaagtactgacatcgtagatggaaatcataaactgactcttggtttgatttggaatataatcctccactggcaggtcaaaaatgtaatgaaaaatatcatggctggattgcaacaaaccaacagtgaaaagattctcctgagctgggtccgacaatcaactcgtaattatccacaggttaatgtaatcaacttcaccaccagctggtctgatggcctggctttgaatgctctcatccatagtcataggccagacctatttgactggaatagtgtggtttgccagcagtcagccacacaacgactggaacatgcattcaacatcgccagatatcaattaggcatagagaaactactcgatcctgaagatgttgataccacctatccagataagaagtccatcttaatgtacatcacatcactcttccaagttttgcctcaacaagtgagcattgaagccatccaggaagtggaaatgttgccaaggccacctaaagtgactaaagaagaacattttcagttacatcatcaaatgcactattctcaacagatcacggtcagtctagcacagggatatgagagaacttcttcccctaagcctcgattcaagagctatgcctacacacaggctgcttatgtcaccacctctgaccctacacggagcccatttccttcacagcatttggaagctcctgaagacaagtcatttggcagttcattgatggagagtgaagtaaacctggaccgttatcaaacagctttagaagaagtattatcgtggcttctttctgctgaggacacattgcaagcacaaggagagatttctaatgatgtggaagtggtgaaagaccagtttcatactcatgaggggtacatgatggatttgacagcccatcagggccgggttggtaatattctacaattgggaagtaagctgattggaacaggaaaattatcagaagatgaagaaactgaagtacaagagcagatgaatctcctaaattcaagatgggaatgcctcagggtagctagcatggaaaaacaaagcaatttacatagagttttaatggatctccagaatcagaaactgaaagagttgaatgactggctaacaaaaacagaagaaagaacaaggaaaatggaggaagagcctcttggacctgatcttgaagacctaaaacgccaagtacaacaacataaggtgcttcaagaagatctagaacaagaacaagtcagggtcaattctctcactcacatggtggtggtagttgatgaatctagtggagatcacgcaactgctgctttggaagaacaacttaaggtattgggagatcgatgggcaaacatctgtagatggacagaagaccgctgggttcttttacaagacatccttctcaaatggcaacgtcttactgaagaacagtgcctttttagtgcatggctttcagaaaaagaagatgcagtgaacaagattcacacaactggctttaaagatcaaaatgaaatgttatcaagtcttcaaaaactggccgttttaaaagcggatctagaaaagaaaaagcaatccatgggcaaactgtattcactcaaacaagatcttctttcaacactgaagaataagtcagtgacccagaagacggaagcatggctggataactttgcccggtgttgggataatttagtccaaaaacttgaaaagagtacagcacagatttcacaggctgtcaccaccactcagccatcactaacacagacaactgtaatggaaacagtaactacggtgaccacaagggaacagatcctggtaaagcatgctcaagaggaacttccaccaccacctccccaaaagaagaggcagattactgtggattctgaaattaggaaaaggttggatgttgatataactgaacttcacagctggattactcgctcagaagctgtgttgcagagtcctgaatttgcaatctttcggaaggaaggcaacttctcagacttaaaagaaaaagtcaatgccatagagcgagaaaaagctgagaagttcagaaaactgcaagatgccagcagatcagctcaggccctggtggaacagatggtgaatgagggtgttaatgcagatagcatcaaacaagcctcagaacaactgaacagccggtggatcgaattctgccagttgctaagtgagagacttaactggctggagtatcagaacaacatcatcgctttctataatcagctacaacaattggagcagatgacaactactgctgaaaactggttgaaaatccaacccaccaccccatcagagccaacagcaattaaaagtcagttaaaaatttgtaaggatgaagtcaaccggctatcagatcttcaacctcaaattgaacgattaaaaattcaaagcatagccctgaaagagaaaggacaaggacccatgttcctggatgcagactttgtggcctttacaaatcattttaagcaagtcttttctgatgtgcaggccagagagaaagagctacagacaatttttgacactttgccaccaatgcgctatcaggagaccatgagtgccatcaggacatgggtccagcagtcagaaaccaaactctccatacctcaacttagtgtcaccgactatgaaatcatggagcagagactcggggaattgcaggctttacaaagttctctgcaagagcaacaaagtggcctatactatctcagcaccactgtgaaagagatgtcgaagaaagcgccctctgaaattagccggaaatatcaatcagaatttgaagaaattgagggacgctggaagaagctctcctcccagctggttgagcattgtcaaaagctagaggagcaaatgaataaactccgaaaaattcagaatcacatacaaaccctgaagaaatggatggctgaagttgatgtttttctgaaggaggaatggcctgcccttggggattcagaaattctaaaaaagcagctgaaacagtgcagacttttagtcagtgatattcagacaattcagcccagtctaaacagtgtcaatgaaggtgggcagaagataaagaatgaagcagagccagagtttgcttcgagacttgagacagaactcaaagaacttaacactcagtgggatcacatgtgccaacaggtctatgccagaaaggaggccttgaagggaggtttggagaaaactgtaagcctccagaaagatctatcagagatgcacgaatggatgacacaagctgaagaagagtatcttgagagagattttgaatataaaactccagatgaattacagaaagcagttgaagagatgaagagagctaaagaagaggcccaacaaaaagaagcgaaagtgaaactccttactgagtctgtaaatagtgtcatagctcaagctccacctgtagcacaagaggccttaaaaaaggaacttgaaactctaaccaccaactaccagtggctctgcactaggctgaatgggaaatgcaagactttggaagaagtttgggcatgttggcatgagttattgtcatacttggagaaagcaaacaagtggctaaatgaagtagaatttaaacttaaaaccactgaaaacattcctggcggagctgaggaaatctctgaggtgctagattcacttgaaaatttgatgcgacattcagaggataacccaaatcagattcgcatattggcacagaccctaacagatggcggagtcatggatgagctaatcaatgaggaacttgagacatttaattctcgttggagggaactacatgaagaggctgtaaggaggcaaaagttgcttgaacagagcatccagtctgcccaggagactgaaaaatccttacacttaatccaggagtccctcacattcattgacaagcagttggcagcttatattgcagacaaggtggacgcagctcaaatgcctcaggaagcccagaaaatccaatctgatttgacaagtcatgagatcagtttagaagaaatgaagaaacataatcaggggaaggaggctgcccaaagagtcctgtctcagattgatgttgcacagaaaaaattacaagatgtctccatgaagtttcgattattccagaaaccagccaattttgagcagcgtctacaagaaagtaagatgattttagatgaagtgaagatgcacttgcctgcattggaaacaaagagtgtggaacaggaagtagtacagtcacagctaaatcattgtgtgaacttgtataaaagtctgagtgaagtgaagtctgaagtggaaatggtgataaagactggacgtcagattgtacagaaaaagcagacggaaaatcccaaagaacttgatgaaagagtaacagctttgaaattgcattataatgagctgggagcaaaggtaacagaaagaaagcaacagttggagaaatgcttgaaattgtcccgtaagatgcgaaaggaaatgaatgtcttgacagaatggctggcagctacagatatggaattgacaaagagatcagcagttgaaggaatgcctagtaatttggattctgaagttgcctggggaaaggctactcaaaaagagattgagaaacagaaggtgcacctgaagagtatcacagaggtaggagaggccttgaaaacagttttgggcaagaaggagacgttggtggaagataaactcagtcttctgaatagtaactggatagctgtcacctcccgagcagaagagtggttaaatcttttgttggaataccagaaacacatggaaacttttgaccagaatgtggaccacatcacaaagtggatcattcaggctgacacacttttggatgaatcagagaaaaagaaaccccagcaaaaagaagacgtgcttaagcgtttaaaggcagaactgaatgacatacgcccaaaggtggactctacacgtgaccaagcagcaaacttgatggcaaaccgcggtgaccactgcaggaaattagtagagccccaaatctcagagctcaaccatcgatttgcagccatttcacacagaattaagactggaaaggcctccattcctttgaaggaattggagcagtttaactcagatatacaaaaattgcttgaaccactggaggctgaaattcagcagggggtgaatctgaaagaggaagacttcaataaagatatgaatgaagacaatgagggtactgtaaaagaattgttgcaaagaggagacaacttacaacaaagaatcacagatgagagaaagcgagaggaaataaagataaaacagcagctgttacagacaaaacataatgctctcaaggatttgaggtctcaaagaagaaaaaaggctctagaaatttctcatcagtggtatcagtacaagaggcaggctgatgatctcctgaaatgcttggatgacattgaaaaaaaattagccagcctacctgagcccagagatgaaaggaaaataaaggaaattgatcgggaattgcagaagaagaaagaggagctgaatgcagtgcgtaggcaagctgagggcttgtctgaggatggggccgcaatggcagtggagccaactcagatccagctcagcaagcgctggcgggaaattgagagcaaatttgctcagtttcgaagactcaactttgcacaaattcacactgtccgtgaagaaacgatgatggtgatgactgaagacatgcctttggaaatttcttatgtgccttctacttatttgactgaaatcactcatgtctcacaagccctattagaagtggaacaacttctcaatgctcctgacctctgtgctaaggactttgaagatctctttaagcaagaggagtctctgaagaatataaaagatagtctacaacaaagctcaggtcggattgacattattcatagcaagaagacagcagcattgcaaagtgcaacgcctgtggaaagggtgaagctacaggaagctctctcccagcttgatttccaatgggaaaaagttaacaaaatgtacaaggaccgacaagggcgatttgacagatctgttgagaaatggcggcgttttcattatgatataaagatatttaatcagtggctaacagaagctgaacagtttctcagaaagacacaaattcctgagaattgggaacatgctaaatacaaatggtatcttaagagaacaggagacagaggacttatccttcttgatgatgtcatttgaaaagaatggctttcaggtccttgagtgagagacacttctgatttccaagagctacatgttcacaattgtaagcccttttgagtaaatgttctaagaaacggaggtaagagtcctatcaacagatgtgtgttggctagaacaaacattaaattttcctggcagcactgagctttctcaagcaggcacttaagggaaggctagggtcatcctagggacatggccttctggggctagaaaccatactagagtttagtcaagtcttagtgcaagggtttggacagagttgttaagtgctgagagttctgtatttctcactgtcacaaaggaagatcagaagctcctgatacttttttcatcagtacaattgaatatataaatcctatacacaaaaataaactaagcttatacaagcatattggtcaaggaatgttgctggccttattaattagatagcccagttaaaagaagaattttttaatataattaatgttaaagtaggatgatagtatataaaacgtgtctactgtcctgaatacaaactaaactgtttggtttagcatttacctcaagatctcttaatatcccccaaagggtccctaaaaccacaacttatctttgtgctcatgaagtagagaagagacagttaatagacatttctagctgatagactgttgtagagcagagaacgctctgtgtttttgaaaattaaacatatgaatttgcccctcttcccctattaaggaagaagagtttcttaattgtgcgaacacatcaagtgaactattcaattagatttttgtgacccagggtataaacatctggttaaggttacatatttcaaaggaacaaaacactagaaactcttggttttaaatctcatggctggaggataatttgcagcagagatttatctggcaagcatacagaattgctgagactgttctaaagatgtaagtgtgggtgtttgtgtcgtgaaaatagctgtttacatctattaagtggataccgatggttgaaagtgccgtctatgtcaagtttttaccaaatcaacttttgcctcactgtgtcagaccattttacctaatcaacttggactgctaatgtcctttcccctggcaccactatctgtctcttttgcaaagcacagaaacggcatgcatgattgtagtttataaaacacatgtaccaatgtggtctacagcttctgttgagttcgagagggtcagtttctgtaatctcttctggcacagagtcaagaacagcttcactttcctcctgctacctctctacccgtaagtgtgaacccatcactttgctaacactcaggaaggggattacacaaaatagagcaggagccctctgacctgaatatgcatctgagccctagccatagagcttctgattcagtagatctgggatggggcctaaatatttgcatttttaagtgtataagtgatgctgatgctgctggttccaggaccacattttaagaaatatcgataaaggtggagaattaaactgcagctcagaagacctgagttcttgccccagcttgacttttacaatctagcaaatggataaaactcgcaggacttcagttctcttcatctacacagtgagtggttagattggctttgtaatttaaaattaaacagggtttgattctgattcactacacaaggttccaaagaaggaatgatatctcctttcatttcttcactttgtcttctgtccctaggtaatcttatctatgttcctgatttaacctaactaatgtttctgcaaagcttctaatatttacatctccagccctgaaactctcatttgaatgctagtcttatatacatacccccctgcctaattgacatctccacttaaatgtatcagaggcaactcagactcaacaaggaccaaactgaatgttcgaccttgtccttcaaacccgatacacatccaggttcctccatcccagtgaatgacactatccagttaagcaagccaaaagtctggattttttttcctcactcttcctcactgtccgtcaactaccattattaaatctgtcacctggtcctactgatttaaccttctcaatatctctacagtttttctttatgcccattagtatcctagtgcaagctaccatcgtctctcattggaattaacacagtaacccccctacccaccagactgttctgcctacagatagtgtgatatttaataaatataaatctagccttggctagatttctccttcaaaaggttcacattaattttagccttaaaatggtgtgcaaagctttgcatagtctgtcctttgctatgttggcagtattttttactatccctctcatctgctcattctctgtactccaactacactaactttgtttttttttttttttagatttctctaactacagtgctgtaatctctttttcctttgcacgtactattccgtttgtcagggaatctgctcactgtctccacccactccacacactcacgttttcctgcccgtcttaccggtcttgatcggttgtcacttgctcaggaaggtttccctggtcaccccctccacaaattgaattaagtcctcttgctgcatgctgtcctagtgctctttattttcctctcctcatccttaattcagtttgtaattacatgttatttgtgtgaggatttgattattatctgtgtcacccactagatattgggcattctttacttactcaccactgaattcatagaaccacagtaattgtacacaacaaatattcaagagaaatttattgaattgatgaatgaaaagttgtaccttaacatgttcctgacatgtatccaaaaaagagctcccctttggggtctattaggactttggacctaggtaaacgtaaccctagtttcgctcaggtttaaacagtagaaagtaattgggtctcttttgcatgtggctttcctaagggctaaccctgtcttcggaatgagtcaatacagcagagctgttgaaagcagactctagcttcggacaacgttggtccgaatcatggttccgtcatttcttagctgtgtgatttagaataaattaatgttttaaagctttgatttcctcttccttaatctggagatgctaataaagccaacttcgtagaggtattgcgatgagtaaataagcataatttgctgtaaacaccttgcagattgcctgttgtatgctaactaatcaataaattgaagctcttaacatcattatattagatatttccagcattgagtatactatcaggcatgtggtagaagctcaatataaagttttgttaaattgaatagattccatatatggtatttctacagcattatgctccttatttaagtgtctctaagtattttttaagtatcacctcacaaaagacagatgtttaattcattacacatgtgaattgttttagatagaaaataaaataaaaaattcaaacattgaaatcaatagtgtaccttaccttaggattacaccataaaatttctaccaatcgagaataaagtgtacagtctatttcctttctaatacttttaacgcaacaaatgtttattgaacacttactacttctaatctatgacagacataaagatgaataaagcatgccacaatgtttaaaggagctcactatatcataagaaagcggattcacacagacaactctataagataaagtggtaaatttaggctggcctgtgaaacaaaggattataggtatagttaagaggtggaatttattttacttcgaggatttcagttacctttatattctttgtctaacctttcatgtttctctttcttcagaaacagagcacctttttcctgacacattcatttccccctatggagtagagcagttgttttcaaagtgtgggtcccagatcagcatcacggggatggttagaaatgcccattcttgagcctcacaacagacctactgaaacagaaattcttggagagtggagcccgcagatctgtgatcaagccctgtaggcaattctaacgcacactcaagttaaagaaccacgggaagaaaggtccatcctgtaacaagacagatttttttcattagcatcaa

SEQ ID NO: 59 - protein, 2160 aa, Homo sapiens
MLWWEEVEDCYEREDVQKKTFTKWVNAQFSKFGKQHIENLFSDLQDGRRLLDLLEGLTGQKLPKEKGSTRVHALNNVNKALRVLQNNNVDLVNIGSTDIVDGNHKLTLGLIWNIILHWQVKNVMKNIMAGLQQTNSEKILLSWVRQSTRNYPQVNVINFTTSWSDGLALNALIHSHRPDLFDWNSVVCQQSATQRLEHAFNIARYQLGIEKLLDPEDVDTTYPDKKSILMYITSLFQVLPQQVSIEAIQEVEMLPRPPKVTKEEHFQLHHQMHYSQQITVSLAQGYERTSSPKPRFKSYAYTQAAYVTTSDPTRSPFPSQHLEAPEDKSFGSSLMESEVNLDRYQTALEEVLSWLLSAEDTLQAQGEISNDVEVVKDQFHTHEGYMMDLTAHQGRVGNILQLGSKLIGTGKLSEDEETEVQEQMNLLNSRWECLRVASMEKQSNLHRVLMDLQNQKLKELNDWLTKTEERTRKMEEEPLGPDLEDLKRQVQQHKVLQEDLEQEQVRVNSLTHMVVVVDESSGDHATAALEEQLKVLGDRWANICRWTEDRWVLLQDILLKWQRLTEEQCLFSAWLSEKEDAVNKIHTTGFKDQNEMLSSLQKLAVLKADLEKKKQSMGKLYSLKQDLLSTLKNKSVTQKTEAWLDNFARCWDNLVQKLEKSTAQISQAVTTTQPSLTQTTVMETVTTVTTREQILVKHAQEELPPPPPQKKRQITVDSEIRKRLDVDITELHSWITRSEAVLQSPEFAIFRKEGNFSDLKEKVNAIEREKAEKFRKLQDASRSAQALVEQMVNEGVNADSIKQASEQLNSRWIEFCQLLSERLNWLEYQNNIIAFYNQLQQLEQMTTTAENWLKIQPTTPSEPTAIKSQLKICKDEVNRLSDLQPQIERLKIQSIALKEKGQGPMFLDADFVAFTNHFKQVFSDVQAREKELQTIFDTLPPMRYQETMSAIRTWVQQSETKLSIPQLSVTDYEIMEQRLGELQALQSSLQEQQSGLYYLSTTVKEMSKKAPSEISRKYQSEFEEIEGRWKKLSSQLVEHCQKLEEQMNKLRKIQNHIQTLKKWMAEVDVFLKEEWPALGDSEILKKQLKQCRLLVSDIQTIQPSLNSVNEGGQKIKNEAEPEFASRLETELKELNTQWDHMCQQVYARKEALKGGLEKTVSLQKDLSEMHEWMTQAEEEYLERDFEYKTPDELQKAVEEMKRAKEEAQQKEAKVKLLTESVNSVIAQAPPVAQEALKKELETLTTNYQWLCTRLNGKCKTLEEVWACWHELLSYLEKANKWLNEVEFKLKTTENIPGGAEEISEVLDSLENLMRHSEDNPNQIRILAQTLTDGGVMDELINEELETFNSRWRELHEEAVRRQKLLEQSIQSAQETEKSLHLIQESLTFIDKQLAAYIADKVDAAQMPQEAQKIQSDLTSHEISLEEMKKHNQGKEAAQRVLSQIDVAQKKLQDVSMKFRLFQKPANFEQRLQESKMILDEVKMHLPALETKSVEQEVVQSQLNHCVNLYKSLSEVKSEVEMVIKTGRQIVQKKQTENPKELDERVTALKLHYNELGAKVTERKQQLEKCLKLSRKMRKEMNVLTEWLAATDMELTKRSAVEGMPSNLDSEVAWGKATQKEIEKQKVHLKSITEVGEALKTVLGKKETLVEDKLSLLNSNWIAVTSRAEEWLNLLLEYQKHMETFDQNVDHITKWIIQADTLLDESEKKKPQQKEDVLKRLKAELNDIRPKVDSTRDQAANLMANRGDHCRKLVEPQISELNHRFAAISHRIKTGKASIPLKELEQFNSDIQKLLEPLEAEIQQGVNLKEEDFNKDMNEDNEGTVKELLQRGDNLQQRITDERKREEIKIKQQLLQTKHNALKDLRSQRRKKALEISHQWYQYKRQADDLLKCLDDIEKKLASLPEPRDERKIKEIDRELQKKKEELNAVRRQAEGLSEDGAAMAVEPTQIQLSKRWREIESKFAQFRRLNFAQIHTVREETMMVMTEDMPLEISYVPSTYLTEITHVSQALLEVEQLLNAPDLCAKDFEDLFKQEESLKNIKDSLQQSSGRIDIIHSKKTAALQSATPVERVKLQEALSQLDFQWEKVNKMYKDRQGRFDRSVEKWRRFHYDIKIFNQWLTEAEQFLRKTQIPENWEHAKYKWYLKRTGDRGLILLDDVI

SEQ ID NO: 60 - DNA, 24 bp, Homo sapiens
tctttttcttcttttttccttttt

SEQ ID NO: 61 - DNA, 24 bp, Homo sapiens
ctttttcttcttttttcctttttg

SEQ ID NO: 62 - DNA, 24 bp, Homo sapiens
tttttcttcttttttcctttttgc

SEQ ID NO: 63 - DNA, 24 bp, Homo sapiens
tcttcttttttcctttttgcaaaa

SEQ ID NO: 64 - DNA, 24 bp, Homo sapiens
cttcttttttcctttttgcaaaaa

SEQ ID NO: 65 - DNA, 24 bp, Homo sapiens
ttcttttttcctttttgcaaaaac

SEQ ID NO: 66 - DNA, 24 bp, Homo sapiens
ttcctttttgcaaaaacccaaaat

SEQ ID NO: 67 - DNA, 24 bp, Homo sapiens
tcctttttgcaaaaacccaaaata

SEQ ID NO: 68 - DNA, 24 bp, Homo sapiens
cctttttgcaaaaacccaaaatat

SEQ ID NO: 69 - DNA, 24 bp, Homo sapiens
ctttttgcaaaaacccaaaatatt

SEQ ID NO: 70 - DNA, 24 bp, Homo sapiens
tgcaaaaacccaaaatattttagc

SEQ ID NO: 71 - DNA, 24 bp, Homo sapiens
gcaaaaacccaaaatattttagct

SEQ ID NO: 72 - DNA, 24 bp, Homo sapiens
caaaaacccaaaatattttagctc

SEQ ID NO: 73 - DNA, 24 bp, Homo sapiens
agctcctactcagactgttactct

SEQ ID NO: 74 - DNA, 24 bp, Homo sapiens
gctcctactcagactgttactctg

SEQ ID NO: 75 - DNA, 24 bp, Homo sapiens
cttagtaaccacaggttgtgtcac

SEQ ID NO: 76 - DNA, 24 bp, Homo sapiens
gagatggcagtttccttagtaacc

SEQ ID NO: 77 - DNA, 24 bp, Homo sapiens
tagtttggagatggcagtttcctt

SEQ ID NO: 78 - DNA, 24 bp, Homo sapiens
ttctcataccttctgcttgatgat

SEQ ID NO: 79 - DNA, 24 bp, Homo sapiens
tcattttttctcataccttctgct

SEQ ID NO: 80 - DNA, 24 bp, Homo sapiens
atcattttttctcataccttctgc

SEQ ID NO: 81 - DNA, 24 bp, Homo sapiens
aagaaaaacttctgccaactttta

SEQ ID NO: 82 - DNA, 24 bp, Homo sapiens
aaagaaaaacttctgccaactttt

SEQ ID NO: 83 - DNA, 24 bp, Homo sapiens
tctttaaaatgaagattttccacc

SEQ ID NO: 84 - DNA, 24 bp, Homo sapiens
ctttaaaatgaagattttccacca

SEQ ID NO: 85 - DNA, 24 bp, Homo sapiens
tttaaaatgaagattttccaccaa

SEQ ID NO: 86 - DNA, 24 bp, Homo sapiens
aaatgaagattttccaccaatcac

SEQ ID NO: 87 - DNA, 24 bp, Homo sapiens
ccaccaatcactttactctcctag

SEQ ID NO: 88 - DNA, 24 bp, Homo sapiens
caccaatcactttactctcctaga

SEQ ID NO: 89 - DNA, 24 bp, Homo sapiens
ctctcctagaccatttcccaccag

SEQ ID NO: 90 - DNA, 24 bp, Homo sapiens
agaaaagattaaacagtgtgctac

SEQ ID NO: 91 - DNA, 24 bp, Homo sapiens
tttgagaaaagattaaacagtgtg

SEQ ID NO: 92 - DNA, 24 bp, Homo sapiens
atttgagaaaagattaaacagtgt

SEQ ID NO: 93 - DNA, 24 bp, Homo sapiens
tatttgagaaaagattaaacagtg

SEQ ID NO: 94 - DNA, 24 bp, Homo sapiens
atcttttctcaaataaaaagacat

SEQ ID NO: 95 - DNA, 24 bp, Homo sapiens
ctcaaataaaaagacatggggctt

SEQ ID NO: 96 - DNA, 24 bp, Homo sapiens
tcaaataaaaagacatggggcttc

SEQ ID NO: 97 - DNA, 24 bp, Homo sapiens
tgttttgcctttttggtatcttac

SEQ ID NO: 98 - DNA, 24 bp, Homo sapiens
gttttgcctttttggtatcttaca

SEQ ID NO: 99 - DNA, 24 bp, Homo sapiens
ttttgcctttttggtatcttacag

SEQ ID NO: 100 - DNA, 24 bp, Homo sapiens
gcctttttggtatcttacaggaac

SEQ ID NO: 101 - DNA, 24 bp, Homo sapiens
cctttttggtatcttacaggaact

SEQ ID NO: 102 - DNA, 24 bp, Homo sapiens
tggtatcttacaggaactccagga

SEQ ID NO: 103 - DNA, 24 bp, Homo sapiens
ggtatcttacaggaactccaggat

SEQ ID NO: 104 - DNA, 24 bp, Homo sapiens
aggattgctgaattatttcttccc

SEQ ID NO: 105 - DNA, 24 bp, Homo sapiens
gaggattgctgaattatttcttcc

SEQ ID NO: 106 - DNA, 24 bp, Homo sapiens
tgaggattgctgaattatttcttc

SEQ ID NO: 107 - DNA, 24 bp, Homo sapiens
ctgtagaatactggcatctgtttt

SEQ ID NO: 108 - DNA, 24 bp, Homo sapiens
cctgtagaatactggcatctgttt

SEQ ID NO: 109 - DNA, 24 bp, Homo sapiens
tcctgtagaatactggcatctgtt

SEQ ID NO: 110 - DNA, 24 bp, Homo sapiens
cagacctcctgccaccgcagattc

SEQ ID NO: 111 - DNA, 24 bp, Homo sapiens
tgtctgacagctgtttgcagacct

SEQ ID NO: 112 - DNA, 24 bp, Homo sapiens
ctgtctgacagctgtttgcagacc

SEQ ID NO: 113 - DNA, 24 bp, Homo sapiens
tctgtctgacagctgtttgcagac

SEQ ID NO: 114 - DNA, 24 bp, Homo sapiens
ttctgtctgacagctgtttgcaga

SEQ ID NO: 115 - DNA, 24 bp, Homo sapiens
attcctattagatctgtcgcccta

SEQ ID NO: 116 - DNA, 24 bp, Homo sapiens
cattcctattagatctgtcgccct

SEQ ID NO: 117 - DNA, 24 bp, Homo sapiens
agcagactttttaagctttcttta

SEQ ID NO: 118 - DNA, 24 bp, Homo sapiens
gcagactttttaagctttctttag

SEQ ID NO: 119 - DNA, 24 bp, Homo sapiens
taagctttctttagaagaatattt

SEQ ID NO: 120 - DNA, 24 bp, Homo sapiens
aagctttctttagaagaatatttc

SEQ ID NO: 121 - DNA, 24 bp, Homo sapiens
agctttctttagaagaatatttca

SEQ ID NO: 122 - DNA, 24 bp, Homo sapiens
tttagaagaatatttcatgagaga

SEQ ID NO: 123 - DNA, 24 bp, Homo sapiens
gaagaatatttcatgagagattat

SEQ ID NO: 124 - DNA, 24 bp, Homo sapiens
tcagtataaccaaaaaatatacgc

SEQ ID NO: 125 - DNA, 24 bp, Homo sapiens
acataatccatctatttttcttga

SEQ ID NO: 126 - DNA, 24 bp, Homo sapiens
cataatccatctatttttcttgat

SEQ ID NO: 127 - DNA, 24 bp, Homo sapiens
tcttgatccatatgcttttacctg

SEQ ID NO: 128 - DNA, 24 bp, Homo sapiens
cttgatccatatgcttttacctgc

SEQ ID NO: 129 - DNA, 24 bp, Homo sapiens
ttgatccatatgcttttacctgca

SEQ ID NO: 130 - DNA, 24 bp, Homo sapiens
tcaacagatctgtcaaatcgcctg

SEQ ID NO: 131 - DNA, 24 bp, Homo sapiens
acctgcaggcgatttgacagatct

SEQ ID NO: 132 - DNA, 24 bp, Homo sapiens
cctgcaggcgatttgacagatctg

SEQ ID NO: 133 - DNA, 24 bp, Homo sapiens
acagatctgttgagaaatggcggc

SEQ ID NO: 134 - DNA, 24 bp, Homo sapiens
tatcataatgaaaacgccgccatt

SEQ ID NO: 135 - DNA, 24 bp, Homo sapiens
cattatgatataaagatatttaat

SEQ ID NO: 136 - DNA, 24 bp, Homo sapiens
tatttagcatgttcccaattctca

SEQ ID NO: 137 - DNA, 24 bp, Homo sapiens
gaaaaaacaaatcaaagacttacc

SEQ ID NO: 138 - DNA, 24 bp, Homo sapiens
atttgttttttcgaaattgtattt

SEQ ID NO: 139 - DNA, 24 bp, Homo sapiens
ttttttcgaaattgtatttatctt

SEQ ID NO: 140 - DNA, 24 bp, Homo sapiens
ttcgaaattgtatttatcttcagc

SEQ ID NO: 141 - DNA, 24 bp, Homo sapiens
tcgaaattgtatttatcttcagca

SEQ ID NO: 142 - DNA, 24 bp, Homo sapiens
cgaaattgtatttatcttcagcac

SEQ ID NO: 143 - DNA, 24 bp, Homo sapiens
gaaattgtatttatcttcagcaca

SEQ ID NO: 144 - DNA, 24 bp, Homo sapiens
agaagttaaagagtccagatgtgc

SEQ ID NO: 145 - DNA, 24 bp, Homo sapiens
tcttcagcacatctggactcttta

SEQ ID NO: 146 - DNA, 24 bp, Homo sapiens
catcacccttcagaacctgatctt

SEQ ID NO: 147 - DNA, 24 bp, Homo sapiens
acttcttaaagatcaggttctgaa

SEQ ID NO: 148 - DNA, 24 bp, Homo sapiens
gactgttgttgtcatcattatatt

SEQ ID NO: 149 - DNA, 24 bp, Homo sapiens
actgttgttgtcatcattatatta

SEQ ID NO: 150 - DNA, 24 bp, Homo sapiens
aactagaataaaaggaaaaataaa

SEQ ID NO: 151 - DNA, 24 bp, Homo sapiens
ctactatatatttatttttccttt

SEQ ID NO: 152 - DNA, 24 bp, Homo sapiens
tttttccttttattctagttgaaa

SEQ ID NO: 153 - DNA, 24 bp, Homo sapiens
tccttttattctagttgaaagaat

SEQ ID NO: 154 - DNA, 24 bp, Homo sapiens
ccttttattctagttgaaagaatt

SEQ ID NO: 155 - DNA, 24 bp, Homo sapiens
cttttattctagttgaaagaattc

SEQ ID NO: 156 - DNA, 24 bp, Homo sapiens
attctagttgaaagaattcagaat

SEQ ID NO: 157 - DNA, 24 bp, Homo sapiens
ttctagttgaaagaattcagaatc

SEQ ID NO: 158 - DNA, 24 bp, Homo sapiens
attcaactgttgcctccggttctg

SEQ ID NO: 159 - DNA, 24 bp, Homo sapiens
acatttcattcaactgttgcctcc

SEQ ID NO: 160 - DNA, 24 bp, Homo sapiens
cttttggattgcatctactgtata

SEQ ID NO: 161 - DNA, 24 bp, Homo sapiens
tgtgattttcttttggattgcatc

SEQ ID NO: 162 - DNA, 24 bp, Homo sapiens
atactaaccttggtttctgtgatt

SEQ ID NO: 163 - DNA, 24 bp, Homo sapiens
aaaaggtatctttgatactaacct

SEQ ID NO: 164 - DNA, 24 bp, Homo sapiens
aaaaaggtatctttgatactaacc

SEQ ID NO: 165 - DNA, 24 bp, Homo sapiens
ttttaaaaaggtatctttgatact

SEQ ID NO: 166 - DNA, 24 bp, Homo sapiens
attttaaaaaggtatctttgatac

SEQ ID NO: 167 - DNA, 24 bp, Homo sapiens
ttaatgcaaactgggacacaaaca

SEQ ID NO: 168 - DNA, 24 bp, Homo sapiens
taaattgccatgtttgtgtcccag

SEQ ID NO: 169 - DNA, 24 bp, Homo sapiens
aaattgccatgtttgtgtcccagt

SEQ ID NO: 170 - DNA, 24 bp, Homo sapiens
aattgccatgtttgtgtcccagtt

SEQ ID NO: 171 - DNA, 24 bp, Homo sapiens
tgtcccagtttgcattaacaaata

SEQ ID NO: 172 - DNA, 24 bp, Homo sapiens
caacatagttctcaaactatttgt

SEQ ID NO: 173 - DNA, 24 bp, Homo sapiens
ccaacatagttctcaaactatttg

SEQ ID NO: 174 - DNA, 24 bp, Homo sapiens
tccaacatagttctcaaactattt

SEQ ID NO: 175 - DNA, 24 bp, Homo sapiens
tttccaacatagttctcaaactat

SEQ ID NO: 176 - DNA, 24 bp, Homo sapiens
ttttccaacatagttctcaaacta

SEQ ID NO: 177 - DNA, 24 bp, Homo sapiens
tttttccaacatagttctcaaact

SEQ ID NO: 178 - DNA, 24 bp, Homo sapiens
cattaacaaatagtttgagaacta

SEQ ID NO: 179 - DNA, 24 bp, Homo sapiens
agaactatgttggaaaaaaaaata

SEQ ID NO: 180 - DNA, 24 bp, Homo sapiens
gttcttctagcctggagaaagaag

SEQ ID NO: 181 - DNA, 24 bp, Homo sapiens
attcttctttctccaggctagaag

SEQ ID NO: 182 - DNA, 24 bp, Homo sapiens
ttcttctttctccaggctagaaga

SEQ ID NO: 183 - DNA, 24 bp, Homo sapiens
tccaggctagaagaacaaaagaat

SEQ ID NO: 184 - DNA, 24 bp, Homo sapiens
aaattctgacaagatattcttttg

SEQ ID NO: 185 - DNA, 24 bp, Homo sapiens
cttttagttgctgctcttttccag

SEQ ID NO: 186 - DNA, 24 bp, Homo sapiens
agaaaataaaattaccttgacttg

SEQ ID NO: 187 - DNA, 24 bp, Homo sapiens
tgcaagcaggccctgggggatttg

SEQ ID NO: 188 - DNA, 24 bp, Homo sapiens
attttctcaaatcccccagggcct

SEQ ID NO: 189 - DNA, 24 bp, Homo sapiens
ttttctcaaatcccccagggcctg

SEQ ID NO: 190 - DNA, 24 bp, Homo sapiens
ctcaaatcccccagggcctgcttg

SEQ ID NO: 191 - DNA, 24 bp, Homo sapiens
tcaaatcccccagggcctgcttgc

SEQ ID NO: 192 - DNA, 24 bp, Homo sapiens
ttaattcaatcattggttttctgc

SEQ ID NO: 193 - DNA, 24 bp, Homo sapiens
taattcaatcattggttttctgcc

SEQ ID NO: 194 - DNA, 24 bp, Homo sapiens
aattcaatcattggttttctgccc

SEQ ID NO: 195 - DNA, 24 bp, Homo sapiens
attcaatcattggttttctgccca

SEQ ID NO: 196 - DNA, 24 bp, Homo sapiens
gcaaggaactatgaataacctaat

SEQ ID NO: 197 - DNA, 24 bp, Homo sapiens
ctgcccattaggttattcatagtt

SEQ ID NO: 198 - DNA, 24 bp, Homo sapiens
tgcccattaggttattcatagttc

SEQ ID NO: 199 - DNA, 24 bp, Homo sapiens
tagaaaacaatttaacaggaaata

SEQ ID NO: 200 - DNA, 24 bp, Homo sapiens
ctgttaaattgttttctataaacc

SEQ ID NO: 201 - DNA, 24 bp, Homo sapiens
gaaataaaaaagatgttactgtat

SEQ ID NO: 202 - DNA, 24 bp, Homo sapiens
agaaataaaaaagatgttactgta

SEQ ID NO: 203 - DNA, 24 bp, Homo sapiens
ctataaacccttatacagtaacat

SEQ ID NO: 204 - DNA, 24 bp, Homo sapiens
tataaacccttatacagtaacatc

SEQ ID NO: 205 - DNA, 24 bp, Homo sapiens
ttatttctaaaagtgttttggctg

SEQ ID NO: 206 - DNA, 24 bp, Homo sapiens
tatttctaaaagtgttttggctgg

SEQ ID NO: 207 - DNA, 24 bp, Homo sapiens
atttctaaaagtgttttggctggt

SEQ ID NO: 208 - DNA, 24 bp, Homo sapiens
tttctaaaagtgttttggctggtc

SEQ ID NO: 209 - DNA, 24 bp, Homo sapiens
taaaagtgttttggctggtctcac

SEQ ID NO: 210 - DNA, 24 bp, Homo sapiens
cataatacaaagtaaagtacaatt

SEQ ID NO: 211 - DNA, 24 bp, Homo sapiens
acataatacaaagtaaagtacaat

SEQ ID NO: 212 - DNA, 24 bp, Homo sapiens
ggctggtctcacaattgtacttta

SEQ ID NO: 213 - DNA, 24 bp, Homo sapiens
gctggtctcacaattgtactttac

SEQ ID NO: 214 - DNA, 24 bp, Homo sapiens
ctttgtattatgtaaaaggaatac

SEQ ID NO: 215 - DNA, 24 bp, Homo sapiens
tattatgtaaaaggaatacacaac

SEQ ID NO: 216 - DNA, 24 bp, Homo sapiens
ttcttacaggcaacaatgcaggat

SEQ ID NO: 217 - DNA, 24 bp, Homo sapiens
gaacagaggcgtccccagttggaa

SEQ ID NO: 218 - DNA, 24 bp, Homo sapiens
ggcagcggtaatgagttcttccaa

SEQ ID NO: 219 - DNA, 24 bp, Homo sapiens
tcaaattttgggcagcggtaatga

SEQ ID NO: 220 - DNA, 24 bp, Homo sapiens
aaaaacaagaccagcaatcaagag

SEQ ID NO: 221 - DNA, 24 bp, Homo sapiens
tgtgtcccatgcttgttaaaaaac

SEQ ID NO: 222 - DNA, 24 bp, Homo sapiens
ttaacaagcatgggacacacaaag

SEQ ID NO: 223 - DNA, 24 bp, Homo sapiens
taacaagcatgggacacacaaagc

SEQ ID NO: 224 - DNA, 24 bp, Homo sapiens
aacaagcatgggacacacaaagca

SEQ ID NO: 225 - DNA, 24 bp, Homo sapiens
acaagcatgggacacacaaagcaa

SEQ ID NO: 226 - DNA, 24 bp, Homo sapiens
ttgaaacttgtcatgcatcttgct

SEQ ID NO: 227 - DNA, 24 bp, Homo sapiens
attgaaacttgtcatgcatcttgc

SEQ ID NO: 228 - DNA, 24 bp, Homo sapiens
tattgaaacttgtcatgcatcttg

SEQ ID NO: 229 - DNA, 24 bp, Homo sapiens
aataaaaacttaagttcatatatc

SEQ ID NO: 230 - DNA, 24 bp, Homo sapiens
gtgaatatattattggatttctat

SEQ ID NO: 231 - DNA, 24 bp, Homo sapiens
aagataattcatgaacatcttaat

SEQ ID NO: 232 - DNA, 24 bp, Homo sapiens
acagaaaagcatacacattactta

SEQ ID NO: 233 - DNA, 24 bp, Homo sapiens
ctgttaaagaggaagttagaagat

SEQ ID NO: 234 - DNA, 24 bp, Homo sapiens
tgttaaagaggaagttagaagatc

SEQ ID NO: 235 - DNA, 24 bp, Homo sapiens
ccgccttccactcagagctcagat

SEQ ID NO: 236 - DNA, 24 bp, Homo sapiens
ccctcagctcttgaagtaaacggt

SEQ ID NO: 237 - DNA, 24 bp, Homo sapiens
cttcaagagctgagggcaaagcag

SEQ ID NO: 238 - DNA, 24 bp, Homo sapiens
aacaaatagctagagccaaagaga

SEQ ID NO: 239 - DNA, 24 bp, Homo sapiens
gaacaaatagctagagccaaagag

SEQ ID NO: 240 - DNA, 24 bp, Homo sapiens
gctctagctatttgttcaaaagtg

SEQ ID NO: 241 - DNA, 24 bp, Homo sapiens
ttcaaaagtgcaactatgaagtga

SEQ ID NO: 242 - DNA, 24 bp, Homo sapiens
tctctcacccagtcatcacttcat

SEQ ID NO: 243 - DNA, 24 bp, Homo sapiens
ctctctcacccagtcatcacttca

SEQ ID NO: 244 - DNA, 24 bp, Homo sapiens
tatatatatatatatttttctctt

SEQ ID NO: 245 - DNA, 24 bp, Homo sapiens
tctctttctatagacagctaattc

SEQ ID NO: 246 - DNA, 24 bp, Homo sapiens
ctctttctatagacagctaattca

SEQ ID NO: 247 - DNA, 24 bp, Homo sapiens
aaacagtaaaaaaatgaattagct

SEQ ID NO: 248 - DNA, 24 bp, Homo sapiens
tctttctatagacagctaattcat

SEQ ID NO: 249 - DNA, 24 bp, Homo sapiens
aaaacagtaaaaaaatgaattagc

SEQ ID NO: 250 - DNA, 24 bp, Homo sapiens
tatagacagctaattcattttttt

SEQ ID NO: 251 - DNA, 24 bp, Homo sapiens
tattctgtaatataaaaattttaa

SEQ ID NO: 252 - DNA, 24 bp, Homo sapiens
atattctgtaatataaaaatttta

SEQ ID NO: 253 - DNA, 24 bp, Homo sapiens
tttactgttttaaaatttttatat

SEQ ID NO: 254 - DNA, 24 bp, Homo sapiens
ttactgttttaaaatttttatatt

SEQ ID NO: 255 - DNA, 24 bp, Homo sapiens
tactgttttaaaatttttatatta

SEQ ID NO: 256 - DNA, 24 bp, Homo sapiens
actgttttaaaatttttatattac

SEQ ID NO: 257 - DNA, 24 bp, Homo sapiens
ctgttttaaaatttttatattaca

SEQ ID NO: 258 - DNA, 24 bp, Homo sapiens
aaaatttttatattacagaatata

SEQ ID NO: 259 - DNA, 24 bp, Homo sapiens
aaatttttatattacagaatataa

SEQ ID NO: 260 - DNA, 24 bp, Homo sapiens
ttgtagactatcttttatattctg

SEQ ID NO: 261 - DNA, 24 bp, Homo sapiens
tatattacagaatataaaagatag

SEQ ID NO: 262 - DNA, 24 bp, Homo sapiens
atattacagaatataaaagatagt

SEQ ID NO: 263 - DNA, 24 bp, Homo sapiens
tattacagaatataaaagatagtc

SEQ ID NO: 264 - DNA, 24 bp, Homo sapiens
caatgctgctgtcttcttgctatg

SEQ ID NO: 265 - DNA, 24 bp, Homo sapiens
caatgggaaaaagttaacaaaatg

SEQ ID NO: 266 - DNA, 24 bp, Homo sapiens
tgcaagtatcaagaaaaatatatg

SEQ ID NO: 267 - DNA, 24 bp, Homo sapiens
tcttgatacttgcagaaatgattt

SEQ ID NO: 268 - DNA, 24 bp, Homo sapiens
cttgatacttgcagaaatgatttg

SEQ ID NO: 269 - DNA, 24 bp, Homo sapiens
ttgatacttgcagaaatgatttgt

SEQ ID NO: 270 - DNA, 24 bp, Homo sapiens
ttttcagggaactgtagaatttat

SEQ ID NO: 271 - DNA, 24 bp, Homo sapiens
catggagggtactgaaataaattc

SEQ ID NO: 272 - DNA, 24 bp, Homo sapiens
ccatggagggtactgaaataaatt

SEQ ID NO: 273 - DNA, 24 bp, Homo sapiens
cagggaactgtagaatttatttca

SEQ ID NO: 274 - DNA, 24 bp, Homo sapiens
tccatggagggtactgaaataaat

SEQ ID NO: 275 - DNA, 24 bp, Homo sapiens
agggaactgtagaatttatttcag

SEQ ID NO: 276 - DNA, 24 bp, Homo sapiens
ttccatggagggtactgaaataaa

SEQ ID NO: 277 - DNA, 24 bp, Homo sapiens
cctgtcttttttccatggagggta

SEQ ID NO: 278 - DNA, 24 bp, Homo sapiens
ccctgtcttttttccatggagggt

SEQ ID NO: 279 - DNA, 24 bp, Homo sapiens
tccctgtcttttttccatggaggg

SEQ ID NO: 280 - DNA, 24 bp, Homo sapiens
tttcagtaccctccatggaaaaaa

SEQ ID NO: 281 - DNA, 24 bp, Homo sapiens
agtaccctccatggaaaaaagaca

SEQ ID NO: 282 - DNA, 24 bp, Homo sapiens
agtttgcatggttcttgctcaagg

SEQ ID NO: 283 - DNA, 24 bp, Homo sapiens
ataagaaaatgcattccttgagca

SEQ ID NO: 284 - DNA, 24 bp, Homo sapiens
cataagaaaatgcattccttgagc

SEQ ID NO: 285 - DNA, 24 bp, Homo sapiens
catggttcttgctcaaggaatgca

SEQ ID NO: 286 - DNA, 24 bp, Homo sapiens
acctacatgtggaaataaattttc

SEQ ID NO: 287 - DNA, 24 bp, Homo sapiens
gacctacatgtggaaataaatttt

SEQ ID NO: 288 - DNA, 24 bp, Homo sapiens
tgacctacatgtggaaataaattt

SEQ ID NO: 289 - DNA, 24 bp, Homo sapiens
cttatgaaaatttatttccacatg

SEQ ID NO: 290 - DNA, 24 bp, Homo sapiens
ttatgaaaatttatttccacatgt

SEQ ID NO: 291 - DNA, 24 bp, Homo sapiens
attacatttttgacctacatgtgg

SEQ ID NO: 292 - DNA, 24 bp, Homo sapiens
cattacatttttgacctacatgtg

SEQ ID NO: 293 - DNA, 24 bp, Homo sapiens
tcattacatttttgacctacatgt

SEQ ID NO: 294 - DNA, 24 bp, Homo sapiens
tttccacatgtaggtcaaaaatgt

SEQ ID NO: 295 - DNA, 24 bp, Homo sapiens
cacatgtaggtcaaaaatgtaatg

SEQ ID NO: 296 - DNA, 24 bp, Homo sapiens
ttgcaatccagccatgatattttt

SEQ ID NO: 297 - DNA, 24 bp, Homo sapiens
actgttggtttgttgcaatccagc

SEQ ID NO: 298 - DNA, 24 bp, Homo sapiens
cactgttggtttgttgcaatccag

SEQ ID NO: 299 - DNA, 24 bp, Homo sapiens
aatgctctcatccatagtcatagg

SEQ ID NO: 300 - DNA, 24 bp, Homo sapiens
atgtctcagtaatcttcttaccta

SEQ ID NO: 301 - DNA, 24 bp, Homo sapiens
caagttatttaatgtctcagtaat

SEQ ID NO: 302 - DNA, 24 bp, Homo sapiens
acaagttatttaatgtctcagtaa

SEQ ID NO: 303 - DNA, 24 bp, Homo sapiens
gactctgatgacatatttttcccc

SEQ ID NO: 304 - DNA, 24 bp, Homo sapiens
tccccagtatggttccagatcatg

SEQ ID NO: 305 - DNA, 24 bp, Homo sapiens
ccccagtatggttccagatcatgt

SEQ ID NO: 306 - DNA, 24 bp, Homo sapiens
cccagtatggttccagatcatgtc

SEQ ID NO: 307 - DNA, 24 bp, Homo sapiens
tatttgtctttgtgtatgtgtgta

SEQ ID NO: 308 - DNA, 24 bp, Homo sapiens
tctttgtgtatgtgtgtatgtgta

SEQ ID NO: 309 - DNA, 24 bp, Homo sapiens
tgtatgtgtgtatgtgtatgtgtt

SEQ ID NO: 310 - DNA, 24 bp, Homo sapiens
aggccagacctatttgactggaat

SEQ ID NO: 311 - DNA, 24 bp, Homo sapiens
ggccagacctatttgactggaata

SEQ ID NO: 312 - DNA, 24 bp, Homo sapiens
actggaatagtgtggtttgccagc

SEQ ID NO: 313 - DNA, 24 bp, Homo sapiens
ccagcagtcagccacacaacgact

SEQ ID NO: 314 - DNA, 24 bp, Homo sapiens
tctatgcctaattgatatctggcg

SEQ ID NO: 315 - DNA, 24 bp, Homo sapiens
ccaaccttcaggatcgagtagttt

SEQ ID NO: 316 - DNA, 24 bp, Homo sapiens
tggactaccactgcttttagtatg

SEQ ID NO: 317 - DNA, 24 bp, Homo sapiens
agtatggtagagtttaatgttttc

SEQ ID NO: 318 - DNA, 24 bp, Homo sapiens
gtatggtagagtttaatgttttca

SEQ ID NO: 319 - DNA, 24 bp, Homo sapiens
agactctaaaaggataatgaacaa

SEQ ID NO: 320 - DNA, 24 bp, Homo sapiens
actttgatttgttcattatccttt

SEQ ID NO: 321 - DNA, 24 bp, Homo sapiens
tatatttgagactctaaaaggata

SEQ ID NO: 322 - DNA, 24 bp, Homo sapiens
atttgttcattatccttttagagt

SEQ ID NO: 323 - DNA, 24 bp, Homo sapiens
gtttctatatttgagactctaaaa

SEQ ID NO: 324 - DNA, 24 bp, Homo sapiens
ggtttctatatttgagactctaaa

SEQ ID NO: 325 - DNA, 24 bp, Homo sapiens
tggtttctatatttgagactctaa

SEQ ID NO: 326 - DNA, 24 bp, Homo sapiens
ttcattatccttttagagtctcaa

SEQ ID NO: 327 - DNA, 24 bp, Homo sapiens
agagtctcaaatatagaaaccaaa

SEQ ID NO: 328 - DNA, 24 bp, Homo sapiens
gagtctcaaatatagaaaccaaaa

SEQ ID NO: 329 - DNA, 24 bp, Homo sapiens
cacttcctggatggcttcaatgct

SEQ ID NO: 330 - DNA, 24 bp, Homo sapiens
gcctcaacaagtgagcattgaagc

SEQ ID NO: 331 - DNA, 24 bp, Homo sapiens
cctcaacaagtgagcattgaagcc

SEQ ID NO: 332 - DNA, 24 bp, Homo sapiens
ggtggccttggcaacatttccact

SEQ ID NO: 333 - DNA, 24 bp, Homo sapiens
gtcactttaggtggccttggcaac

SEQ ID NO: 334 - DNA, 24 bp, Homo sapiens
atgatgtaactgaaaatgttcttc

SEQ ID NO: 335 - DNA, 24 bp, Homo sapiens
cctgttgagaatagtgcatttgat

SEQ ID NO: 336 - DNA, 24 bp, Homo sapiens
cagttacatcatcaaatgcactat

SEQ ID NO: 337 - DNA, 24 bp, Homo sapiens
agttacatcatcaaatgcactatt

SEQ ID NO: 338 - DNA, 24 bp, Homo sapiens
cacactttacctgttgagaatagt

SEQ ID NO: 339 - DNA, 24 bp, Homo sapiens
ctgttttatatgcatttttaggta

SEQ ID NO: 340 - DNA, 24 bp, Homo sapiens
tgttttatatgcatttttaggtat

SEQ ID NO: 341 - DNA, 24 bp, Homo sapiens
atatgcatttttaggtattacgtg

SEQ ID NO: 342 - DNA, 24 bp, Homo sapiens
tatgcatttttaggtattacgtgc

SEQ ID NO: 343 - DNA, 24 bp, Homo sapiens
taggtattacgtgcacatatatat

SEQ ID NO: 344 - DNA, 24 bp, Homo sapiens
aggtattacgtgcacatatatata

SEQ ID NO: 345 - DNA, 24 bp, Homo sapiens
ggtattacgtgcacatatatatat

SEQ ID NO: 346 - DNA, 24 bp, Homo sapiens
agcaacaactataatattgtgcag

SEQ ID NO: 347 - DNA, 24 bp, Homo sapiens
gttcctccatctttctctttttat

SEQ ID NO: 348 - DNA, 24 bp, Homo sapiens
tctttttatggagttcactaggtg

SEQ ID NO: 349 - DNA, 24 bp, Homo sapiens
tatggagttcactaggtgcaccat

SEQ ID NO: 350 - DNA, 24 bp, Homo sapiens
atggagttcactaggtgcaccatt

SEQ ID NO: 351 - DNA, 24 bp, Homo sapiens
tggagttcactaggtgcaccattc

SEQ ID NO: 352 - DNA, 24 bp, Homo sapiens
ataattgcatctgaacatttggtc

SEQ ID NO: 353 - DNA, 24 bp, Homo sapiens
gtcctttgcagggtgagtgagcga

SEQ ID NO: 354 - DNA, 24 bp, Homo sapiens
ttccaaagcagcctctcgctcact

SEQ ID NO: 355 - DNA, 24 bp, Homo sapiens
cagggtgagtgagcgagaggctgc

SEQ ID NO: 356 - DNA, 24 bp, Homo sapiens
gaagaaactcatagattactgcaa

SEQ ID NO: 357 - DNA, 24 bp, Homo sapiens
caggtccagggggaactgttgcag

SEQ ID NO: 358 - DNA, 24 bp, Homo sapiens
ccaggtccagggggaactgttgca

SEQ ID NO: 359 - DNA, 24 bp, Homo sapiens
agcttctgtaagccaggcaagaaa

SEQ ID NO: 360 - DNA, 24 bp, Homo sapiens
ttgcctggcttacagaagctgaaa

SEQ ID NO: 361 - DNA, 24 bp, Homo sapiens
cttacgggtagcatcctgtaggac

SEQ ID NO: 362 - DNA, 24 bp, Homo sapiens
ctcccttggagtcttctaggagcc

SEQ ID NO: 363 - DNA, 24 bp, Homo sapiens
actcccttggagtcttctaggagc

SEQ ID NO: 364 - DNA, 24 bp, Homo sapiens
atcagctcttttactcccttggag

SEQ ID NO: 365 - DNA, 24 bp, Homo sapiens
cgctttagcactcttgtggatcca

SEQ ID NO: 366 - DNA, 24 bp, Homo sapiens
gcactcttgtggatccaattgaac

SEQ ID NO: 367 - DNA, 24 bp, Homo sapiens
tccctggcttgtcagttacaagta

SEQ ID NO: 368 - DNA, 24 bp, Homo sapiens
gtccctggcttgtcagttacaagt

SEQ ID NO: 369 - DNA, 24 bp, Homo sapiens
ttttgtccctggcttgtcagttac

SEQ ID NO: 370 - DNA, 24 bp, Homo sapiens
gttttgtccctggcttgtcagtta

SEQ ID NO: 371 - DNA, 24 bp, Homo sapiens
tacttgtaactgacaagccaggga

SEQ ID NO: 372 - DNA, 24 bp, Homo sapiens
gctcctactcagactgttactctg

SEQ ID NO: 373 - DNA, 24 bp, Homo sapiens
taccatgtattgctaaacaaagta

SEQ ID NO: 374 - DNA, 24 bp, Homo sapiens
attgaagagtaacaatttgagcca

SEQ ID NO: 375 - DNA, 24 bp, Mus musculus
aggctctgcaaagttctttgaaag

SEQ ID NO: 376 - DNA, 24 bp, Mus musculus
aaagagcaacaaaatggcttcaac

SEQ ID NO: 377 - DNA, 24 bp, Mus musculus
aaagagcaataaaatggcttcaac

SEQ ID NO: 378 - DNA, 24 bp, Mus musculus
aaagaactttgcagagcctcaaaa

SEQ ID NO: 379 - DNA, 24 bp, Mus musculus
ctgaatatctatgcattaataact

SEQ ID NO: 380 - DNA, 24 bp, Mus musculus
tattatattacagggcatattata

SEQ ID NO: 381 - DNA, 24 bp, Mus musculus
aggtaagccgaggtttggccttta

SEQ ID NO: 382 - DNA, 24 bp, Mus musculus
cccagagtccttcaaagatattga

SEQ ID NO: 383 - RNA, 24 nt, Artificial Sequence
  source: /note="Description of Artificial Sequence: Synthetic oligonucleotide"
aaaaaggaaaaaagaagaaaaaga

SEQ ID NO: 384 - RNA, 24 nt, Artificial Sequence
  source: /note="Description of Artificial Sequence: Synthetic oligonucleotide"
caaaaaggaaaaaagaagaaaaag

SEQ ID NO: 385 - RNA, 24 nt, Artificial Sequence
  source: /note="Description of Artificial Sequence: Synthetic oligonucleotide"
gcaaaaaggaaaaaagaagaaaaa

SEQ ID NO: 386 - RNA, 24 nt, Artificial Sequence
  source: /note="Description of Artificial Sequence: Synthetic oligonucleotide"
uuuugcaaaaaggaaaaaagaaga

SEQ ID NO: 387 - RNA, 24 nt, Artificial Sequence
  source: /note="Description of Artificial Sequence: Synthetic oligonucleotide"
uuuuugcaaaaaggaaaaaagaag

SEQ ID NO: 388 - RNA, 24 nt, Artificial Sequence
  source: /note="Description of Artificial Sequence: Synthetic oligonucleotide"
guuuuugcaaaaaggaaaaaagaa

SEQ ID NO: 389 - RNA, 24 nt, Artificial Sequence
  source: /note="Description of Artificial Sequence: Synthetic oligonucleotide"
auuuuggguuuuugcaaaaaggaa

SEQ ID NO: 390 - RNA, 24 nt, Artificial Sequence
  source: /note="Description of Artificial Sequence: Synthetic oligonucleotide"
uauuuuggguuuuugcaaaaagga

SEQ ID NO: 391 - RNA, 24 nt, Artificial Sequence
  source: /note="Description of Artificial Sequence: Synthetic oligonucleotide"
auauuuuggguuuuugcaaaaagg

SEQ ID NO: 392 - RNA, 24 nt, Artificial Sequence
  source: /note="Description of Artificial Sequence: Synthetic oligonucleotide"
aauauuuuggguuuuugcaaaaag

SEQ ID NO: 393 - RNA, 24 nt, Artificial Sequence
  source: /note="Description of Artificial Sequence: Synthetic oligonucleotide"
gcuaaaauauuuuggguuuuugca

SEQ ID NO: 394 - RNA, 24 nt, Artificial Sequence
  source: /note="Description of Artificial Sequence: Synthetic oligonucleotide"
agcuaaaauauuuuggguuuuugc

SEQ ID NO: 395 - RNA, 24 nt, Artificial Sequence
  source: /note="Description of Artificial Sequence: Synthetic oligonucleotide"
gagcuaaaauauuuuggguuuuug

SEQ ID NO: 396 - RNA, 24 nt, Artificial Sequence
  source: /note="Description of Artificial Sequence: Synthetic oligonucleotide"
agaguaacagucugaguaggagcu

SEQ ID NO: 397 - RNA, 24 nt, Artificial Sequence
  source: /note="Description of Artificial Sequence: Synthetic oligonucleotide"
cagaguaacagucugaguaggagc

SEQ ID NO: 398 - RNA, 24 nt, Artificial Sequence
  source: /note="Description of Artificial Sequence: Synthetic oligonucleotide"
gugacacaaccugugguuacuaag

SEQ ID NO: 399 - RNA, 23 nt, Artificial Sequence
  source: /note="Description of Artificial Sequence: Synthetic oligonucleotide"
gguuacuaaggaaacugccaucu

SEQ ID NO: 400 - RNA, 24 nt, Artificial Sequence
  source: /note="Description of Artificial Sequence: Synthetic oligonucleotide"
aaggaaacugccaucuccaaacua

SEQ ID NO: 401 - RNA, 24 nt, Artificial Sequence
  source: /note="Description of Artificial Sequence: Synthetic oligonucleotide"
aucaucaagcagaagguaugagaa

SEQ ID NO: 402 - RNA, 24 nt, Artificial Sequence
  source: /note="Description of Artificial Sequence: Synthetic oligonucleotide"
agcagaagguaugagaaaaaauga

SEQ ID NO: 403 - RNA, 24 nt, Artificial Sequence
  source: /note="Description of Artificial Sequence: Synthetic oligonucleotide"
gcagaagguaugagaaaaaaugau

SEQ ID NO: 404 - RNA, 24 nt, Artificial Sequence
  source: /note="Description of Artificial Sequence: Synthetic oligonucleotide"
uaaaaguuggcagaaguuuuucuu

SEQ ID NO: 405 - RNA, 24 nt, Artificial Sequence
  source: /note="Description of Artificial Sequence: Synthetic oligonucleotide"
aaaaguuggcagaaguuuuucuuu

SEQ ID NO: 406 - RNA, 24 nt, Artificial Sequence
  source: /note="Description of Artificial Sequence: Synthetic oligonucleotide"
gguggaaaaucuucauuuuaaaga

SEQ ID NO: 407 - RNA, 24 nt, Artificial Sequence
  source: /note="Description of Artificial Sequence: Synthetic oligonucleotide"
ugguggaaaaucuucauuuuaaag

SEQ ID NO: 408 - RNA, 24 nt, Artificial Sequence
  source: /note="Description of Artificial Sequence: Synthetic oligonucleotide"
uugguggaaaaucuucauuuuaaa

SEQ ID NO: 409 - RNA, 24 nt, Artificial Sequence
  source: /note="Description of Artificial Sequence: Synthetic oligonucleotide"
gugauugguggaaaaucuucauuu

SEQ ID NO: 410 - RNA, 24 nt, Artificial Sequence
  source: /note="Description of Artificial Sequence: Synthetic oligonucleotide"
cuaggagaguaaagugauuggugg

SEQ ID NO: 411 - RNA, 24 nt, Artificial Sequence
  source: /note="Description of Artificial Sequence: Synthetic oligonucleotide"
ucuaggagaguaaagugauuggug

SEQ ID NO: 412 - RNA, 23 nt, Artificial Sequence
  source: /note="Description of Artificial Sequence: Synthetic oligonucleotide"
cuggugggaaauggucuaggaga

SEQ ID NO: 413 - RNA, 24 nt, Artificial Sequence
  source: /note="Description of Artificial Sequence: Synthetic oligonucleotide"
guagcacacuguuuaaucuuuucu

SEQ ID NO: 414 - RNA, 24 nt, Artificial Sequence
  source: /note="Description of Artificial Sequence: Synthetic oligonucleotide"
cacacuguuuaaucuuuucucaaa

SEQ ID NO: 415 - RNA, 24 nt, Artificial Sequence
  source: /note="Description of Artificial Sequence: Synthetic oligonucleotide"
acacuguuuaaucuuuucucaaau

SEQ ID NO: 416 - RNA, 24 nt, Artificial Sequence
  source: /note="Description of Artificial Sequence: Synthetic oligonucleotide"
cacuguuuaaucuuuucucaaaua

SEQ ID NO: 417 - RNA, 24 nt, Artificial Sequence
  source: /note="Description of Artificial Sequence: Synthetic oligonucleotide"
augucuuuuuauuugagaaaagau

SEQ ID NO: 418 - RNA, 24 nt, Artificial Sequence
  source: /note="Description of Artificial Sequence: Synthetic oligonucleotide"
aagccccaugucuuuuuauuugag

SEQ ID NO: 419 - RNA, 24 nt, Artificial Sequence
  source: /note="Description of Artificial Sequence: Synthetic oligonucleotide"
gaagccccaugucuuuuuauuuga

SEQ ID NO: 420 - RNA, 24 nt, Artificial Sequence
  source: /note="Description of Artificial Sequence: Synthetic oligonucleotide"
guaagauaccaaaaaggcaaaaca

SEQ ID NO: 421 - RNA, 24 nt, Artificial Sequence
  source: /note="Description of Artificial Sequence: Synthetic oligonucleotide"
uguaagauaccaaaaaggcaaaac

SEQ ID NO: 422 - RNA, 24 nt, Artificial Sequence
  source: /note="Description of Artificial Sequence: Synthetic oligonucleotide"
cuguaagauaccaaaaaggcaaaa

SEQ ID NO: 423 - RNA, 24 nt, Artificial Sequence
  source: /note="Description of Artificial Sequence: Synthetic oligonucleotide"
guuccuguaagauaccaaaaaggc

SEQ ID NO: 424 - RNA, 24 nt, Artificial Sequence
  source: /note="Description of Artificial Sequence: Synthetic oligonucleotide"
aguuccuguaagauaccaaaaagg

SEQ ID NO: 425 - RNA, 24 nt, Artificial Sequence
  source: /note="Description of Artificial Sequence: Synthetic oligonucleotide"
uccuggaguuccuguaagauacca

SEQ ID NO: 426 - RNA, 24 nt, Artificial Sequence
  source: /note="Description of Artificial Sequence: Synthetic oligonucleotide"
auccuggaguuccuguaagauacc

SEQ ID NO: 427 - RNA, 24 nt, Artificial Sequence
  source: /note="Description of Artificial Sequence: Synthetic oligonucleotide"
gggaagaaauaauucagcaauccu

SEQ ID NO: 428 - RNA, 24 nt, Artificial Sequence
  source: /note="Description of Artificial Sequence: Synthetic oligonucleotide"
ggaagaaauaauucagcaauccuc

SEQ ID NO: 429 - RNA, 24 nt, Artificial Sequence
  source: /note="Description of Artificial Sequence: Synthetic oligonucleotide"
gaagaaauaauucagcaauccuca

SEQ ID NO: 430 - RNA, 24 nt, Artificial Sequence
  source: /note="Description of Artificial Sequence: Synthetic oligonucleotide"
aaaacagaugccaguauucuacag

SEQ ID NO: 431 - RNA, 24 nt, Artificial Sequence
  source: /note="Description of Artificial Sequence: Synthetic oligonucleotide"
aaacagaugccaguauucuacagg

SEQ ID NO: 432 - RNA, 24 nt, Artificial Sequence
  source: /note="Description of Artificial Sequence: Synthetic oligonucleotide"
aacagaugccaguauucuacagga

SEQ ID NO: 433 - RNA, 24 nt, Artificial Sequence
  source: /note="Description of Artificial Sequence: Synthetic oligonucleotide"
gaaucugcgguggcaggaggucug

SEQ ID NO: 434 - RNA, 24 nt, Artificial Sequence
  source: /note="Description of Artificial Sequence: Synthetic oligonucleotide"
aggucugcaaacagcugucagaca

SEQ ID NO: 435 - RNA, 24 nt, Artificial Sequence
  source: /note="Description of Artificial Sequence: Synthetic oligonucleotide"
ggucugcaaacagcugucagacag

SEQ ID NO: 436 - RNA, 24 nt, Artificial Sequence
  source: /note="Description of Artificial Sequence: Synthetic oligonucleotide"
gucugcaaacagcugucagacaga

SEQ ID NO: 437 - RNA, 24 nt, Artificial Sequence
  source: /note="Description of Artificial Sequence: Synthetic oligonucleotide"
ucugcaaacagcugucagacagaa

SEQ ID NO: 438 - RNA, 24 nt, Artificial Sequence
  source: /note="Description of Artificial Sequence: Synthetic oligonucleotide"
uagggcgacagaucuaauaggaau

SEQ ID NO: 439 - RNA, 24 nt, Artificial Sequence
  source: /note="Description of Artificial Sequence: Synthetic oligonucleotide"
agggcgacagaucuaauaggaaug

SEQ ID NO: 440 - RNA, 24 nt, Artificial Sequence
  source: /note="Description of Artificial Sequence: Synthetic oligonucleotide"
uaaagaaagcuuaaaaagucugcu

SEQ ID NO: 441 - RNA, 24 nt, Artificial Sequence
  source: /note="Description of Artificial Sequence: Synthetic oligonucleotide"
cuaaagaaagcuuaaaaagucugc

SEQ ID NO: 442 - RNA, 24 nt, Artificial Sequence
  source: /note="Description of Artificial Sequence: Synthetic oligonucleotide"
aaauauucuucuaaagaaagcuua

SEQ ID NO: 443 - RNA, 24 nt, Artificial Sequence
  source: /note="Description of Artificial Sequence: Synthetic oligonucleotide"
gaaauauucuucuaaagaaagcuu

SEQ ID NO: 444 - RNA, 24 nt, Artificial Sequence
  source: /note="Description of Artificial Sequence: Synthetic oligonucleotide"
ugaaauauucuucuaaagaaagcu

SEQ ID NO: 445 - RNA, 24 nt, Artificial Sequence
  source: /note="Description of Artificial Sequence: Synthetic oligonucleotide"
ucucucaugaaauauucuucuaaa

SEQ ID NO: 446 - RNA, 24 nt, Artificial Sequence
  source: /note="Description of Artificial Sequence: Synthetic oligonucleotide"
auaaucucucaugaaauauucuuc

SEQ ID NO: 447 - RNA, 24 nt, Artificial Sequence
  source: /note="Description of Artificial Sequence: Synthetic oligonucleotide"
gcguauauuuuuugguuauacuga

SEQ ID NO: 448 - RNA, 24 nt, Artificial Sequence
  source: /note="Description of Artificial Sequence: Synthetic oligonucleotide"
ucaagaaaaauagauggauuaugu

SEQ ID NO: 449 - RNA, 24 nt, Artificial Sequence
  source: /note="Description of Artificial Sequence: Synthetic oligonucleotide"
aucaagaaaaauagauggauuaug

SEQ ID NO: 450 - RNA, 24 nt, Artificial Sequence
  source: /note="Description of Artificial Sequence: Synthetic oligonucleotide"
cagguaaaagcauauggaucaaga

SEQ ID NO: 451 - RNA, 24 nt, Artificial Sequence
  source: /note="Description of Artificial Sequence: Synthetic oligonucleotide"
gcagguaaaagcauauggaucaag

SEQ ID NO: 452 - RNA, 24 nt, Artificial Sequence
  source: /note="Description of Artificial Sequence: Synthetic oligonucleotide"
ugcagguaaaagcauauggaucaa

SEQ ID NO: 453 - RNA, 24 nt, Artificial Sequence
  source: /note="Description of Artificial Sequence: Synthetic oligonucleotide"
caggcgauuugacagaucuguuga

SEQ ID NO: 454 - RNA, 24 nt, Artificial Sequence
  source: /note="Description of Artificial Sequence: Synthetic oligonucleotide"
agaucugucaaaucgccugcaggu

SEQ ID NO: 455 - RNA, 24 nt, Artificial Sequence
  source: /note="Description of Artificial Sequence: Synthetic oligonucleotide"
cagaucugucaaaucgccugcagg

SEQ ID NO: 456 - RNA, 24 nt, Artificial Sequence
  source: /note="Description of Artificial Sequence: Synthetic oligonucleotide"
gccgccauuucucaacagaucugu

SEQ ID NO: 457 - RNA, 24 nt, Artificial Sequence
  source: /note="Description of Artificial Sequence: Synthetic oligonucleotide"
aauggcggcguuuucauuaugaua

SEQ ID NO: 458 - RNA, 24 nt, Artificial Sequence
  source: /note="Description of Artificial Sequence: Synthetic oligonucleotide"
auuaaauaucuuuauaucauaaug

SEQ ID NO: 459 - RNA, 24 nt, Artificial Sequence
  source: /note="Description of Artificial Sequence: Synthetic oligonucleotide"
ugagaauugggaacaugcuaaaua

SEQ ID NO: 460 - RNA, 24 nt, Artificial Sequence
  source: /note="Description of Artificial Sequence: Synthetic oligonucleotide"
gguaagucuuugauuuguuuuuuc

SEQ ID NO: 461 - RNA, 24 nt, Artificial Sequence
  source: /note="Description of Artificial Sequence: Synthetic oligonucleotide"
aaauacaauuucgaaaaaacaaau

SEQ ID NO: 462 - RNA, 24 nt, Artificial Sequence
  source: /note="Description of Artificial Sequence: Synthetic oligonucleotide"
aagauaaauacaauuucgaaaaaa

SEQ ID NO: 463 - RNA, 24 nt, Artificial Sequence
  source: /note="Description of Artificial Sequence: Synthetic oligonucleotide"
gcugaagauaaauacaauuucgaa

SEQ ID NO: 464 - RNA, 24 nt, Artificial Sequence
  source: /note="Description of Artificial Sequence: Synthetic oligonucleotide"
ugcugaagauaaauacaauuucga

SEQ ID NO: 465 - RNA, 24 nt, Artificial Sequence
  source: /note="Description of Artificial Sequence: Synthetic oligonucleotide"
gugcugaagauaaauacaauuucg

SEQ ID NO: 466 - RNA, 24 nt, Artificial Sequence
  source: /note="Description of Artificial Sequence: Synthetic oligonucleotide"
ugugcugaagauaaauacaauuuc

SEQ ID NO: 467 - RNA, 24 nt, Artificial Sequence
  source: /note="Description of Artificial Sequence: Synthetic oligonucleotide"
gcacaucuggacucuuuaacuucu

SEQ ID NO: 468 - RNA, 24 nt, Artificial Sequence
  source: /note="Description of Artificial Sequence: Synthetic oligonucleotide"
uaaagaguccagaugugcugaaga

SEQ ID NO: 469 - RNA, 24 nt, Artificial Sequence
  source: /note="Description of Artificial Sequence: Synthetic oligonucleotide"
aagaucagguucugaagggugaug

SEQ ID NO: 470 - RNA, 24 nt, Artificial Sequence
  source: /note="Description of Artificial Sequence: Synthetic oligonucleotide"
uucagaaccugaucuuuaagaagu

SEQ ID NO: 471 - RNA, 24 nt, Artificial Sequence
  source: /note="Description of Artificial Sequence: Synthetic oligonucleotide"
aauauaaugaugacaacaacaguc

SEQ ID NO: 472 - RNA, 24 nt, Artificial Sequence
  source: /note="Description of Artificial Sequence: Synthetic oligonucleotide"
uaauauaaugaugacaacaacagu

SEQ ID NO: 473 - RNA, 24 nt, Artificial Sequence
  source: /note="Description of Artificial Sequence: Synthetic oligonucleotide"
uuuauuuuuccuuuuauucuaguu

SEQ ID NO: 474 - RNA, 24 nt, Artificial Sequence
  source: /note="Description of Artificial Sequence: Synthetic oligonucleotide"
aaaggaaaaauaaauauauaguag

SEQ ID NO: 475 - RNA, 24 nt, Artificial Sequence
  source: /note="Description of Artificial Sequence: Synthetic oligonucleotide"
uuucaacuagaauaaaaggaaaaa

SEQ ID NO: 476 - RNA, 24 nt, Artificial Sequence
  source: /note="Description of Artificial Sequence: Synthetic oligonucleotide"
auucuuucaacuagaauaaaagga

SEQ ID NO: 477 - RNA, 24 nt, Artificial Sequence
  source: /note="Description of Artificial Sequence: Synthetic oligonucleotide"
aauucuuucaacuagaauaaaagg

SEQ ID NO: 478 - RNA, 24 nt, Artificial Sequence
  source: /note="Description of Artificial Sequence: Synthetic oligonucleotide"
gaauucuuucaacuagaauaaaag

SEQ ID NO: 479 - RNA, 24 nt, Artificial Sequence
  source: /note="Description of Artificial Sequence: Synthetic oligonucleotide"
auucugaauucuuucaacuagaau

SEQ ID NO: 480 - RNA, 24 nt, Artificial Sequence
  source: /note="Description of Artificial Sequence: Synthetic oligonucleotide"
gauucugaauucuuucaacuagaa

SEQ ID NO: 481 - RNA, 24 nt, Artificial Sequence
  source: /note="Description of Artificial Sequence: Synthetic oligonucleotide"
cagaaccggaggcaacaguugaau

SEQ ID NO: 482 - RNA, 24 nt, Artificial Sequence
  source: /note="Description of Artificial Sequence: Synthetic oligonucleotide"
ggaggcaacaguugaaugaaaugu

SEQ ID NO: 483 - RNA, 24 nt, Artificial Sequence
  source: /note="Description of Artificial Sequence: Synthetic oligonucleotide"
uauacaguagaugcaauccaaaag

SEQ ID NO: 484 - RNA, 24 nt, Artificial Sequence
  source: /note="Description of Artificial Sequence: Synthetic oligonucleotide"
gaugcaauccaaaagaaaaucaca

SEQ ID NO: 485 - RNA, 24 nt, Artificial Sequence
  source: /note="Description of Artificial Sequence: Synthetic oligonucleotide"
aaucacagaaaccaagguuaguau

SEQ ID NO: 486 - RNA, 23 nt, Artificial Sequence
  source: /note="Description of Artificial Sequence: Synthetic oligonucleotide"
agguuaguaucaaagauaccuuu

SEQ ID NO: 487 - RNA, 24 nt, Artificial Sequence
  source: /note="Description of Artificial Sequence: Synthetic oligonucleotide"
gguuaguaucaaagauaccuuuuu

SEQ ID NO: 488 - RNA, 24 nt, Artificial Sequence
  source: /note="Description of Artificial Sequence: Synthetic oligonucleotide"
aguaucaaagauaccuuuuuaaaa

SEQ ID NO: 489 - RNA, 24 nt, Artificial Sequence
  source: /note="Description of Artificial Sequence: Synthetic oligonucleotide"
guaucaaagauaccuuuuuaaaau

SEQ ID NO: 490 - RNA, 24 nt, Artificial Sequence
  source: /note="Description of Artificial Sequence: Synthetic oligonucleotide"
uguuugugucccaguuugcauuaa

SEQ ID NO: 491 - RNA, 24 nt, Artificial Sequence
  source: /note="Description of Artificial Sequence: Synthetic oligonucleotide"
cugggacacaaacauggcaauuua

SEQ ID NO: 492 - RNA, 24 nt, Artificial Sequence
  source: /note="Description of Artificial Sequence: Synthetic oligonucleotide"
acugggacacaaacauggcaauuu

SEQ ID NO: 493 - RNA, 24 nt, Artificial Sequence
  source: /note="Description of Artificial Sequence: Synthetic oligonucleotide"
aacugggacacaaacauggcaauu

SEQ ID NO: 494 - RNA, 24 nt, Artificial Sequence
  source: /note="Description of Artificial Sequence: Synthetic oligonucleotide"
uauuuguuaaugcaaacugggaca

SEQ ID NO: 495 - RNA, 24 nt, Artificial Sequence
  source: /note="Description of Artificial Sequence: Synthetic oligonucleotide"
acaaauaguuugagaacuauguug

SEQ ID NO: 496 - RNA, 24 nt, Artificial Sequence
  source: /note="Description of Artificial Sequence: Synthetic oligonucleotide"
caaauaguuugagaacuauguugg

SEQ ID NO: 497 - RNA, 24 nt, Artificial Sequence
  source: /note="Description of Artificial Sequence: Synthetic oligonucleotide"
aaauaguuugagaacuauguugga

SEQ ID NO: 498 - RNA, 24 nt, Artificial Sequence
  source: /note="Description of Artificial Sequence: Synthetic oligonucleotide"
auaguuugagaacuauguuggaaa

SEQ ID NO: 499 - RNA, 24 nt, Artificial Sequence
  source: /note="Description of Artificial Sequence: Synthetic oligonucleotide"
uaguuugagaacuauguuggaaaa

SEQ ID NO: 500 - RNA, 24 nt, Artificial Sequence
  source: /note="Description of Artificial Sequence: Synthetic oligonucleotide"
aguuugagaacuauguuggaaaaa

SEQ ID NO: 501 - RNA, 24 nt, Artificial Sequence
  source: /note="Description of Artificial Sequence: Synthetic oligonucleotide"
uaguucucaaacuauuuguuaaug

SEQ ID NO: 502 - RNA, 24 nt, Artificial Sequence
  source: /note="Description of Artificial Sequence: Synthetic oligonucleotide"
uauuuuuuuuuccaacauaguucu

SEQ ID NO: 503 - RNA, 24 nt, Artificial Sequence
  source: /note="Description of Artificial Sequence: Synthetic oligonucleotide"
cuucuuucuccaggcuagaagaac

SEQ ID NO: 504 - RNA, 24 nt, Artificial Sequence
  source: /note="Description of Artificial Sequence: Synthetic oligonucleotide"
cuucuagccuggagaaagaagaau

SEQ ID NO: 505 - RNA, 24 nt, Artificial Sequence
  source: /note="Description of Artificial Sequence: Synthetic oligonucleotide"
ucuucuagccuggagaaagaagaa

SEQ ID NO: 506 - RNA, 24 nt, Artificial Sequence
  source: /note="Description of Artificial Sequence: Synthetic oligonucleotide"
auucuuuuguucuucuagccugga

SEQ ID NO: 507 - RNA, 24 nt, Artificial Sequence
  source: /note="Description of Artificial Sequence: Synthetic oligonucleotide"
caaaagaauaucuugucagaauuu

SEQ ID NO: 508 - RNA, 24 nt, Artificial Sequence
  source: /note="Description of Artificial Sequence: Synthetic oligonucleotide"
cuggaaaagagcagcaacuaaaag

SEQ ID NO: 509 - RNA, 24 nt, Artificial Sequence
  source: /note="Description of Artificial Sequence: Synthetic oligonucleotide"
caagucaagguaauuuuauuuucu

SEQ ID NO: 510 - RNA, 24 nt, Artificial Sequence
  source: /note="Description of Artificial Sequence: Synthetic oligonucleotide"
caaaucccccagggccugcuugca

SEQ ID NO: 511 - RNA, 24 nt, Artificial Sequence
  source: /note="Description of Artificial Sequence: Synthetic oligonucleotide"
aggcccugggggauuugagaaaau

SEQ ID NO: 512 - RNA, 24 nt, Artificial Sequence
  source: /note="Description of Artificial Sequence: Synthetic oligonucleotide"
caggcccugggggauuugagaaaa

SEQ ID NO: 513 - RNA, 24 nt, Artificial Sequence
  source: /note="Description of Artificial Sequence: Synthetic oligonucleotide"
caagcaggcccugggggauuugag

SEQ ID NO: 514 - RNA, 24 nt, Artificial Sequence
  source: /note="Description of Artificial Sequence: Synthetic oligonucleotide"
gcaagcaggcccugggggauuuga

SEQ ID NO: 515 - RNA, 24 nt, Artificial Sequence
  source: /note="Description of Artificial Sequence: Synthetic oligonucleotide"
gcagaaaaccaaugauugaauuaa

SEQ ID NO: 516 - RNA, 24 nt, Artificial Sequence
  source: /note="Description of Artificial Sequence: Synthetic oligonucleotide"
ggcagaaaaccaaugauugaauua

SEQ ID NO: 517 - RNA, 24 nt, Artificial Sequence
  source: /note="Description of Artificial Sequence: Synthetic oligonucleotide"
gggcagaaaaccaaugauugaauu

SEQ ID NO: 518 - RNA, 24 nt, Artificial Sequence
  source: /note="Description of Artificial Sequence: Synthetic oligonucleotide"
ugggcagaaaaccaaugauugaau

SEQ ID NO: 519 - RNA, 24 nt, Artificial Sequence
  source: /note="Description of Artificial Sequence: Synthetic oligonucleotide"
auuagguuauucauaguuccuugc

SEQ ID NO: 520 - RNA, 24 nt, Artificial Sequence
  source: /note="Description of Artificial Sequence: Synthetic oligonucleotide"
aacuaugaauaaccuaaugggcag

SEQ ID NO: 521 - RNA, 24 nt, Artificial Sequence
  source: /note="Description of Artificial Sequence: Synthetic oligonucleotide"
gaacuaugaauaaccuaaugggca

SEQ ID NO: 522 - RNA, 24 nt, Artificial Sequence
  source: /note="Description of Artificial Sequence: Synthetic oligonucleotide"
uauuuccuguuaaauuguuuucua

SEQ ID NO: 523 - RNA, 24 nt, Artificial Sequence
  source: /note="Description of Artificial Sequence: Synthetic oligonucleotide"
gguuuauagaaaacaauuuaacag

SEQ ID NO: 524 - RNA, 24 nt, Artificial Sequence
  source: /note="Description of Artificial Sequence: Synthetic oligonucleotide"
auacaguaacaucuuuuuuauuuc

SEQ ID NO: 525 - RNA, 24 nt, Artificial Sequence
  source: /note="Description of Artificial Sequence: Synthetic oligonucleotide"
uacaguaacaucuuuuuuauuucu

SEQ ID NO: 526 - RNA, 24 nt, Artificial Sequence
  source: /note="Description of Artificial Sequence: Synthetic oligonucleotide"
auguuacuguauaaggguuuauag

SEQ ID NO: 527 - RNA, 24 nt, Artificial Sequence
  source: /note="Description of Artificial Sequence: Synthetic oligonucleotide"
gauguuacuguauaaggguuuaua

SEQ ID NO: 528 - RNA, 24 nt, Artificial Sequence
  source: /note="Description of Artificial Sequence: Synthetic oligonucleotide"
cagccaaaacacuuuuagaaauaa

SEQ ID NO: 529 - RNA, 24 nt, Artificial Sequence
  source: /note="Description of Artificial Sequence: Synthetic oligonucleotide"
ccagccaaaacacuuuuagaaaua

SEQ ID NO: 530 - RNA, 24 nt, Artificial Sequence
  source: /note="Description of Artificial Sequence: Synthetic oligonucleotide"
accagccaaaacacuuuuagaaau

SEQ ID NO: 531 - RNA, 24 nt, Artificial Sequence
  source: /note="Description of Artificial Sequence: Synthetic oligonucleotide"
gaccagccaaaacacuuuuagaaa

SEQ ID NO: 532 - RNA, 24 nt, Artificial Sequence
  source: /note="Description of Artificial Sequence: Synthetic oligonucleotide"
gugagaccagccaaaacacuuuua

SEQ ID NO: 533 - RNA, 24 nt, Artificial Sequence
  source: /note="Description of Artificial Sequence: Synthetic oligonucleotide"
aauuguacuuuacuuuguauuaug

SEQ ID NO: 534 - RNA, 24 nt, Artificial Sequence
  source: /note="Description of Artificial Sequence: Synthetic oligonucleotide"
auuguacuuuacuuuguauuaugu

SEQ ID NO: 535 - RNA, 24 nt, Artificial Sequence
  source: /note="Description of Artificial Sequence: Synthetic oligonucleotide"
uaaaguacaauugugagaccagcc

SEQ ID NO: 536 - RNA, 24 nt, Artificial Sequence
  source: /note="Description of Artificial Sequence: Synthetic oligonucleotide"
guaaaguacaauugugagaccagc

SEQ ID NO: 537 - RNA, 24 nt, Artificial Sequence
  source: /note="Description of Artificial Sequence: Synthetic oligonucleotide"
guauuccuuuuacauaauacaaag

SEQ ID NO: 538 - RNA, 24 nt, Artificial Sequence
  source: /note="Description of Artificial Sequence: Synthetic oligonucleotide"
guuguguauuccuuuuacauaaua

SEQ ID NO: 539 - RNA, 24 nt, Artificial Sequence
  source: /note="Description of Artificial Sequence: Synthetic oligonucleotide"
auccugcauuguugccuguaagaa

SEQ ID NO: 540 - RNA, 24 nt, Artificial Sequence
  source: /note="Description of Artificial Sequence: Synthetic oligonucleotide"
uuccaacuggggacgccucuguuc

SEQ ID NO: 541 - RNA, 24 nt, Artificial Sequence
  source: /note="Description of Artificial Sequence: Synthetic oligonucleotide"
uuggaagaacucauuaccgcugcc

SEQ ID NO: 542 - RNA, 24 nt, Artificial Sequence
  source: /note="Description of Artificial Sequence: Synthetic oligonucleotide"
ucauuaccgcugcccaaaauuuga

SEQ ID NO: 543 - RNA, 24 nt, Artificial Sequence
  source: /note="Description of Artificial Sequence: Synthetic oligonucleotide"
cucuugauugcuggucuuguuuuu

SEQ ID NO: 544 - RNA, 24 nt, Artificial Sequence
  source: /note="Description of Artificial Sequence: Synthetic oligonucleotide"
guuuuuuaacaagcaugggacaca

SEQ ID NO: 545 - RNA, 24 nt, Artificial Sequence
  source: /note="Description of Artificial Sequence: Synthetic oligonucleotide"
cuuugugugucccaugcuuguuaa

SEQ ID NO: 546 - RNA, 24 nt, Artificial Sequence
  source: /note="Description of Artificial Sequence: Synthetic oligonucleotide"
gcuuugugugucccaugcuuguua

SEQ ID NO: 547 - RNA, 24 nt, Artificial Sequence
  source: /note="Description of Artificial Sequence: Synthetic oligonucleotide"
ugcuuugugugucccaugcuuguu

SEQ ID NO: 548 - RNA, 24 nt, Artificial Sequence
  source: /note="Description of Artificial Sequence: Synthetic oligonucleotide"
uugcuuugugugucccaugcuugu

SEQ ID NO: 549 - RNA, 24 nt, Artificial Sequence
  source: /note="Description of Artificial Sequence: Synthetic oligonucleotide"
agcaagaugcaugacaaguuucaa

SEQ ID NO: 550 - RNA, 24 nt, Artificial Sequence
  source: /note="Description of Artificial Sequence: Synthetic oligonucleotide"
gcaagaugcaugacaaguuucaau

SEQ ID NO: 551 - RNA, 24 nt, Artificial Sequence
  source: /note="Description of Artificial Sequence: Synthetic oligonucleotide"
caagaugcaugacaaguuucaaua

SEQ ID NO: 552 - RNA, 24 nt, Artificial Sequence
  source: /note="Description of Artificial Sequence: Synthetic oligonucleotide"
gauauaugaacuuaaguuuuuauu

SEQ ID NO: 553 - RNA, 24 nt, Artificial Sequence
  source: /note="Description of Artificial Sequence: Synthetic oligonucleotide"
auagaaauccaauaauauauucac

SEQ ID NO: 554 - RNA, 24 nt, Artificial Sequence
  source: /note="Description of Artificial Sequence: Synthetic oligonucleotide"
auuaagauguucaugaauuaucuu

SEQ ID NO: 555 - RNA, 24 nt, Artificial Sequence
  source: /note="Description of Artificial Sequence: Synthetic oligonucleotide"
uaaguaauguguaugcuuuucugu

SEQ ID NO: 556 - RNA, 24 nt, Artificial Sequence
  source: /note="Description of Artificial Sequence: Synthetic oligonucleotide"
aucuucuaacuuccucuuuaacag

SEQ ID NO: 557 - RNA, 24 nt, Artificial Sequence
  source: /note="Description of Artificial Sequence: Synthetic oligonucleotide"
gaucuucuaacuuccucuuuaaca

SEQ ID NO: 558 - RNA, 24 nt, Artificial Sequence
  source: /note="Description of Artificial Sequence: Synthetic oligonucleotide"
aucugagcucugaguggaaggcgg

SEQ ID NO: 559 - RNA, 24 nt, Artificial Sequence
  source: /note="Description of Artificial Sequence: Synthetic oligonucleotide"
accguuuacuucaagagcugaggg

SEQ ID NO: 560 - RNA, 24 nt, Artificial Sequence
  source: /note="Description of Artificial Sequence: Synthetic oligonucleotide"
cugcuuugcccucagcucuugaag

SEQ ID NO: 561 - RNA, 24 nt, Artificial Sequence
  source: /note="Description of Artificial Sequence: Synthetic oligonucleotide"
ucucuuuggcucuagcuauuuguu

SEQ ID NO: 562 - RNA, 24 nt, Artificial Sequence
  source: /note="Description of Artificial Sequence: Synthetic oligonucleotide"
cucuuuggcucuagcuauuuguuc

SEQ ID NO: 563 - RNA, 24 nt, Artificial Sequence
  source: /note="Description of Artificial Sequence: Synthetic oligonucleotide"
cacuuuugaacaaauagcuagagc

SEQ ID NO: 564 - RNA, 24 nt, Artificial Sequence
  source: /note="Description of Artificial Sequence: Synthetic oligonucleotide"
ucacuucauaguugcacuuuugaa

SEQ ID NO: 565 - RNA, 24 nt, Artificial Sequence
  source: /note="Description of Artificial Sequence: Synthetic oligonucleotide"
augaagugaugacugggugagaga

SEQ ID NO: 566 - RNA, 24 nt, Artificial Sequence
  source: /note="Description of Artificial Sequence: Synthetic oligonucleotide"
ugaagugaugacugggugagagag

SEQ ID NO: 567 - RNA, 24 nt, Artificial Sequence
  source: /note="Description of Artificial Sequence: Synthetic oligonucleotide"
aagagaaaaauauauauauauaua

SEQ ID NO: 568 - RNA, 24 nt, Artificial Sequence
  source: /note="Description of Artificial Sequence: Synthetic oligonucleotide"
gaauuagcugucuauagaaagaga

SEQ ID NO: 569 - RNA, 24 nt, Artificial Sequence
  source: /note="Description of Artificial Sequence: Synthetic oligonucleotide"
ugaauuagcugucuauagaaagag

SEQ ID NO: 570 - RNA, 24 nt, Artificial Sequence
  source: /note="Description of Artificial Sequence: Synthetic oligonucleotide"
agcuaauucauuuuuuuacuguuu

SEQ ID NO: 571 - RNA, 24 nt, Artificial Sequence
  source: /note="Description of Artificial Sequence: Synthetic oligonucleotide"
augaauuagcugucuauagaaaga

SEQ ID NO: 572 - RNA, 24 nt, Artificial Sequence
  source: /note="Description of Artificial Sequence: Synthetic oligonucleotide"
gcuaauucauuuuuuuacuguuuu

SEQ ID NO: 573 - RNA, 24 nt, Artificial Sequence
  source: /note="Description of Artificial Sequence: Synthetic oligonucleotide"
aaaaaaaugaauuagcugucuaua

SEQ ID NO: 574 - RNA, 24 nt, Artificial Sequence
  source: /note="Description of Artificial Sequence: Synthetic oligonucleotide"
uuaaaauuuuuauauuacagaaua

SEQ ID NO: 575 - RNA, 24 nt, Artificial Sequence
  source: /note="Description of Artificial Sequence: Synthetic oligonucleotide"
uaaaauuuuuauauuacagaauau

SEQ ID NO: 576 - RNA, 24 nt, Artificial Sequence
  source: /note="Description of Artificial Sequence: Synthetic oligonucleotide"
auauaaaaauuuuaaaacaguaaa

SEQ ID NO: 577 - RNA, 24 nt, Artificial Sequence
  source: /note="Description of Artificial Sequence: Synthetic oligonucleotide"
aauauaaaaauuuuaaaacaguaa

SEQ ID NO: 578 - RNA, 24 nt, Artificial Sequence
  source: /note="Description of Artificial Sequence: Synthetic oligonucleotide"
uaauauaaaaauuuuaaaacagua

SEQ ID NO: 579 - RNA, 24 nt, Artificial Sequence
  source: /note="Description of Artificial Sequence: Synthetic oligonucleotide"
guaauauaaaaauuuuaaaacagu

SEQ ID NO: 580 - RNA, 24 nt, Artificial Sequence
  source: /note="Description of Artificial Sequence: Synthetic oligonucleotide"
uguaauauaaaaauuuuaaaacag

SEQ ID NO: 581 - RNA, 24 nt, Artificial Sequence
  source: /note="Description of Artificial Sequence: Synthetic oligonucleotide"
uauauucuguaauauaaaaauuuu

SEQ ID NO: 582 - RNA, 24 nt, Artificial Sequence
  source: /note="Description of Artificial Sequence: Synthetic oligonucleotide"
uuauauucuguaauauaaaaauuu

SEQ ID NO: 583 - RNA, 24 nt, Artificial Sequence
  source: /note="Description of Artificial Sequence: Synthetic oligonucleotide"
cagaauauaaaagauagucuacaa

SEQ ID NO: 584 - RNA, 24 nt, Artificial Sequence
  source: /note="Description of Artificial Sequence: Synthetic oligonucleotide"
cuaucuuuuauauucuguaauaua

SEQ ID NO: 585 - RNA, 24 nt, Artificial Sequence
  source: /note="Description of Artificial Sequence: Synthetic oligonucleotide"
acuaucuuuuauauucuguaauau

SEQ ID NO: 586 - RNA, 24 nt, Artificial Sequence
  source: /note="Description of Artificial Sequence: Synthetic oligonucleotide"
gacuaucuuuuauauucuguaaua

SEQ ID NO: 587 - RNA, 24 nt, Artificial Sequence
  source: /note="Description of Artificial Sequence: Synthetic oligonucleotide"
cauagcaagaagacagcagcauug

SEQ ID NO: 588 - RNA, 24 nt, Artificial Sequence
  source: /note="Description of Artificial Sequence: Synthetic oligonucleotide"
cauuuuguuaacuuuuucccauug

SEQ ID NO: 589 - RNA, 24 nt, Artificial Sequence
  source: /note="Description of Artificial Sequence: Synthetic oligonucleotide"
cauauauuuuucuugauacuugca

SEQ ID NO: 590 - RNA, 24 nt, Artificial Sequence
  source: /note="Description of Artificial Sequence: Synthetic oligonucleotide"
aaaucauuucugcaaguaucaaga

SEQ ID NO: 591 - RNA, 24 nt, Artificial Sequence
  source: /note="Description of Artificial Sequence: Synthetic oligonucleotide"
caaaucauuucugcaaguaucaag

SEQ ID NO: 592 - RNA, 24 nt, Artificial Sequence
  source: /note="Description of Artificial Sequence: Synthetic oligonucleotide"
acaaaucauuucugcaaguaucaa

SEQ ID NO: 593 - RNA, 24 nt, Artificial Sequence
  source: /note="Description of Artificial Sequence: Synthetic oligonucleotide"
auaaauucuacaguucccugaaaa

SEQ ID NO: 594 - RNA, 24 nt, Artificial Sequence
  source: /note="Description of Artificial Sequence: Synthetic oligonucleotide"
gaauuuauuucaguacccuccaug

SEQ ID NO: 595 - RNA, 24 nt, Artificial Sequence
  source: /note="Description of Artificial Sequence: Synthetic oligonucleotide"
aauuuauuucaguacccuccaugg

SEQ ID NO: 596 - RNA, 24 nt, Artificial Sequence
  source: /note="Description of Artificial Sequence: Synthetic oligonucleotide"
ugaaauaaauucuacaguucccug

SEQ ID NO: 597 - RNA, 24 nt, Artificial Sequence
  source: /note="Description of Artificial Sequence: Synthetic oligonucleotide"
auuuauuucaguacccuccaugga

SEQ ID NO: 598 - RNA, 24 nt, Artificial Sequence
  source: /note="Description of Artificial Sequence: Synthetic oligonucleotide"
cugaaauaaauucuacaguucccu

SEQ ID NO: 599 - RNA, 24 nt, Artificial Sequence
  source: /note="Description of Artificial Sequence: Synthetic oligonucleotide"
uuuauuucaguacccuccauggaa

SEQ ID NO: 600 - RNA, 24 nt, Artificial Sequence
  source: /note="Description of Artificial Sequence: Synthetic oligonucleotide"
uacccuccauggaaaaaagacagg

SEQ ID NO: 601 - RNA, 24 nt, Artificial Sequence
  source: /note="Description of Artificial Sequence: Synthetic oligonucleotide"
acccuccauggaaaaaagacaggg

SEQ ID NO: 602 - RNA, 24 nt, Artificial Sequence
  source: /note="Description of Artificial Sequence: Synthetic oligonucleotide"
cccuccauggaaaaaagacaggga

SEQ ID NO: 603 - RNA, 24 nt, Artificial Sequence
  source: /note="Description of Artificial Sequence: Synthetic oligonucleotide"
uuuuuuccauggaggguacugaaa

SEQ ID NO: 604 - RNA, 24 nt, Artificial Sequence
  source: /note="Description of Artificial Sequence: Synthetic oligonucleotide"
ugucuuuuuuccauggaggguacu

SEQ ID NO: 605 - RNA, 24 nt, Artificial Sequence
  source: /note="Description of Artificial Sequence: Synthetic oligonucleotide"
ccuugagcaagaaccaugcaaacu

SEQ ID NO: 606 - RNA, 24 nt, Artificial Sequence
  source: /note="Description of Artificial Sequence: Synthetic oligonucleotide"
ugcucaaggaaugcauuuucuuau

SEQ ID NO: 607 - RNA, 24 nt, Artificial Sequence
  source: /note="Description of Artificial Sequence: Synthetic oligonucleotide"
gcucaaggaaugcauuuucuuaug

SEQ ID NO: 608 - RNA, 24 nt, Artificial Sequence
  source: /note="Description of Artificial Sequence: Synthetic oligonucleotide"
ugcauuccuugagcaagaaccaug

SEQ ID NO: 609 - RNA, 24 nt, Artificial Sequence
  source: /note="Description of Artificial Sequence: Synthetic oligonucleotide"
gaaaauuuauuuccacauguaggu

SEQ ID NO: 610 - RNA, 24 nt, Artificial Sequence
  source: /note="Description of Artificial Sequence: Synthetic oligonucleotide"
aaaauuuauuuccacauguagguc

SEQ ID NO: 611 - RNA, 24 nt, Artificial Sequence
  source: /note="Description of Artificial Sequence: Synthetic oligonucleotide"
aaauuuauuuccacauguagguca

SEQ ID NO: 612 - RNA, 24 nt, Artificial Sequence
  source: /note="Description of Artificial Sequence: Synthetic oligonucleotide"
cauguggaaauaaauuuucauaag

SEQ ID NO: 613 - RNA, 24 nt, Artificial Sequence
  source: /note="Description of Artificial Sequence: Synthetic oligonucleotide"
acauguggaaauaaauuuucauaa

SEQ ID NO: 614 - RNA, 24 nt, Artificial Sequence
  source: /note="Description of Artificial Sequence: Synthetic oligonucleotide"
ccacauguaggucaaaaauguaau

SEQ ID NO: 615 - RNA, 24 nt, Artificial Sequence
  source: /note="Description of Artificial Sequence: Synthetic oligonucleotide"
cacauguaggucaaaaauguaaug

SEQ ID NO: 616 - RNA, 24 nt, Artificial Sequence
  source: /note="Description of Artificial Sequence: Synthetic oligonucleotide"
acauguaggucaaaaauguaauga

SEQ ID NO: 617 - RNA, 24 nt, Artificial Sequence
  source: /note="Description of Artificial Sequence: Synthetic oligonucleotide"
acauuuuugaccuacauguggaaa

SEQ ID NO: 618 - RNA, 24 nt, Artificial Sequence
  source: /note="Description of Artificial Sequence: Synthetic oligonucleotide"
cauuacauuuuugaccuacaugug

SEQ ID NO: 619 - RNA, 24 nt, Artificial Sequence
  source: /note="Description of Artificial Sequence: Synthetic oligonucleotide"
aaaaauaucauggcuggauugcaa

SEQ ID NO: 620 - RNA, 24 nt, Artificial Sequence
  source: /note="Description of Artificial Sequence: Synthetic oligonucleotide"
gcuggauugcaacaaaccaacagu

SEQ ID NO: 621 - RNA, 24 nt, Artificial Sequence
  source: /note="Description of Artificial Sequence: Synthetic oligonucleotide"
cuggauugcaacaaaccaacagug

SEQ ID NO: 622 - RNA, 24 nt, Artificial Sequence
  source: /note="Description of Artificial Sequence: Synthetic oligonucleotide"
ccuaugacuauggaugagagcauu

SEQ ID NO: 623 - RNA, 24 nt, Artificial Sequence
  source: /note="Description of Artificial Sequence: Synthetic oligonucleotide"
uagguaagaagauuacugagacau

SEQ ID NO: 624 - RNA, 24 nt, Artificial Sequence
  source: /note="Description of Artificial Sequence: Synthetic oligonucleotide"
auuacugagacauuaaauaacuug

SEQ ID NO: 625 - RNA, 24 nt, Artificial Sequence
  source: /note="Description of Artificial Sequence: Synthetic oligonucleotide"
uuacugagacauuaaauaacuugu

SEQ ID NO: 626 - RNA, 24 nt, Artificial Sequence
  source: /note="Description of Artificial Sequence: Synthetic oligonucleotide"
ggggaaaaauaugucaucagaguc

SEQ ID NO: 627 - RNA, 24 nt, Artificial Sequence
  source: /note="Description of Artificial Sequence: Synthetic oligonucleotide"
caugaucuggaaccauacugggga

SEQ ID NO: 628 - RNA, 24 nt, Artificial Sequence
  source: /note="Description of Artificial Sequence: Synthetic oligonucleotide"
acaugaucuggaaccauacugggg

SEQ ID NO: 629 - RNA, 24 nt, Artificial Sequence
  source: /note="Description of Artificial Sequence: Synthetic oligonucleotide"
gacaugaucuggaaccauacuggg

SEQ ID NO: 630 - RNA, 24 nt, Artificial Sequence
  source: /note="Description of Artificial Sequence: Synthetic oligonucleotide"
uacacacauacacaaagacaaaua

SEQ ID NO: 631 - RNA, 24 nt, Artificial Sequence
  source: /note="Description of Artificial Sequence: Synthetic oligonucleotide"
uacacauacacacauacacaaaga

SEQ ID NO: 632 - RNA, 24 nt, Artificial Sequence
  source: /note="Description of Artificial Sequence: Synthetic oligonucleotide"
aacacauacacauacacacauaca

SEQ ID NO: 633 - RNA, 24 nt, Artificial Sequence
  source: /note="Description of Artificial Sequence: Synthetic oligonucleotide"
auuccagucaaauaggucuggccu

SEQ ID NO: 634 - RNA, 24 nt, Artificial Sequence
  source: /note="Description of Artificial Sequence: Synthetic oligonucleotide"
uauuccagucaaauaggucuggcc

SEQ ID NO: 635 - RNA, 24 nt, Artificial Sequence
  source: /note="Description of Artificial Sequence: Synthetic oligonucleotide"
gcuggcaaaccacacuauuccagu

SEQ ID NO: 636 - RNA, 24 nt, Artificial Sequence
  source: /note="Description of Artificial Sequence: Synthetic oligonucleotide"
agucguuguguggcugacugcugg

SEQ ID NO: 637 - RNA, 24 nt, Artificial Sequence
  source: /note="Description of Artificial Sequence: Synthetic oligonucleotide"
cgccagauaucaauuaggcauaga

SEQ ID NO: 638 - RNA, 24 nt, Artificial Sequence
  source: /note="Description of Artificial Sequence: Synthetic oligonucleotide"
aaacuacucgauccugaagguugg

SEQ ID NO: 639 - RNA, 24 nt, Artificial Sequence
  source: /note="Description of Artificial Sequence: Synthetic oligonucleotide"
cauacuaaaagcagugguagucca

SEQ ID NO: 640 - RNA, 24 nt, Artificial Sequence
  source: /note="Description of Artificial Sequence: Synthetic oligonucleotide"
gaaaacauuaaacucuaccauacu

SEQ ID NO: 641 - RNA, 24 nt, Artificial Sequence
  source: /note="Description of Artificial Sequence: Synthetic oligonucleotide"
ugaaaacauuaaacucuaccauac

SEQ ID NO: 642 - RNA, 24 nt, Artificial Sequence
  source: /note="Description of Artificial Sequence: Synthetic oligonucleotide"
uuguucauuauccuuuuagagucu

SEQ ID NO: 643 - RNA, 24 nt, Artificial Sequence
  source: /note="Description of Artificial Sequence: Synthetic oligonucleotide"
aaaggauaaugaacaaaucaaagu

SEQ ID NO: 644 - RNA, 24 nt, Artificial Sequence
  source: /note="Description of Artificial Sequence: Synthetic oligonucleotide"
uauccuuuuagagucucaaauaua

SEQ ID NO: 645 - RNA, 24 nt, Artificial Sequence
  source: /note="Description of Artificial Sequence: Synthetic oligonucleotide"
acucuaaaaggauaaugaacaaau

SEQ ID NO: 646 - RNA, 24 nt, Artificial Sequence
  source: /note="Description of Artificial Sequence: Synthetic oligonucleotide"
uuuuagagucucaaauauagaaac

SEQ ID NO: 647 - RNA, 24 nt, Artificial Sequence
  source: /note="Description of Artificial Sequence: Synthetic oligonucleotide"
uuuagagucucaaauauagaaacc

SEQ ID NO: 648 - RNA, 24 nt, Artificial Sequence
  source: /note="Description of Artificial Sequence: Synthetic oligonucleotide"
uuagagucucaaauauagaaacca

SEQ ID NO: 649 - RNA, 24 nt, Artificial Sequence
  source: /note="Description of Artificial Sequence: Synthetic oligonucleotide"
uugagacucuaaaaggauaaugaa

SEQ ID NO: 650 - RNA, 24 nt, Artificial Sequence
  source: /note="Description of Artificial Sequence: Synthetic oligonucleotide"
uuugguuucuauauuugagacucu

SEQ ID NO: 651 - RNA, 24 nt, Artificial Sequence
  source: /note="Description of Artificial Sequence: Synthetic oligonucleotide"
uuuugguuucuauauuugagacuc

SEQ ID NO: 652 - RNA, 24 nt, Artificial Sequence
  source: /note="Description of Artificial Sequence: Synthetic oligonucleotide"
agcauugaagccauccaggaagug

SEQ ID NO: 653 - RNA, 24 nt, Artificial Sequence
  source: /note="Description of Artificial Sequence: Synthetic oligonucleotide"
gcuucaaugcucacuuguugaggc

SEQ ID NO: 654 - RNA, 24 nt, Artificial Sequence
  source: /note="Description of Artificial Sequence: Synthetic oligonucleotide"
ggcuucaaugcucacuuguugagg

SEQ ID NO: 655 - RNA, 24 nt, Artificial Sequence
  source: /note="Description of Artificial Sequence: Synthetic oligonucleotide"
aguggaaauguugccaaggccacc

SEQ ID NO: 656 - RNA, 24 nt, Artificial Sequence
  source: /note="Description of Artificial Sequence: Synthetic oligonucleotide"
guugccaaggccaccuaaagugac

SEQ ID NO: 657 - RNA, 24 nt, Artificial Sequence
  source: /note="Description of Artificial Sequence: Synthetic oligonucleotide"
gaagaacauuuucaguuacaucau

SEQ ID NO: 658 - RNA, 24 nt, Artificial Sequence
  source: /note="Description of Artificial Sequence: Synthetic oligonucleotide"
aucaaaugcacuauucucaacagg

SEQ ID NO: 659 - RNA, 24 nt, Artificial Sequence
  source: /note="Description of Artificial Sequence: Synthetic oligonucleotide"
auagugcauuugaugauguaacug

SEQ ID NO: 660 - RNA, 24 nt, Artificial Sequence
  source: /note="Description of Artificial Sequence: Synthetic oligonucleotide"
aauagugcauuugaugauguaacu

SEQ ID NO: 661 - RNA, 24 nt, Artificial Sequence
  source: /note="Description of Artificial Sequence: Synthetic oligonucleotide"
acuauucucaacagguaaagugug

SEQ ID NO: 662 - RNA, 24 nt, Artificial Sequence
  source: /note="Description of Artificial Sequence: Synthetic oligonucleotide"
uaccuaaaaaugcauauaaaacag

SEQ ID NO: 663 - RNA, 24 nt, Artificial Sequence
  source: /note="Description of Artificial Sequence: Synthetic oligonucleotide"
auaccuaaaaaugcauauaaaaca

SEQ ID NO: 664 - RNA, 24 nt, Artificial Sequence
  source: /note="Description of Artificial Sequence: Synthetic oligonucleotide"
cacguaauaccuaaaaaugcauau

SEQ ID NO: 665 - RNA, 24 nt, Artificial Sequence
  source: /note="Description of Artificial Sequence: Synthetic oligonucleotide"
gcacguaauaccuaaaaaugcaua

SEQ ID NO: 666 - RNA, 24 nt, Artificial Sequence
  source: /note="Description of Artificial Sequence: Synthetic oligonucleotide"
auauauaugugcacguaauaccua

SEQ ID NO: 667 - RNA, 24 nt, Artificial Sequence
  source: /note="Description of Artificial Sequence: Synthetic oligonucleotide"
uauauauaugugcacguaauaccu

SEQ ID NO: 668 - RNA, 24 nt, Artificial Sequence
  source: /note="Description of Artificial Sequence: Synthetic oligonucleotide"
auauauauaugugcacguaauacc

SEQ ID NO: 669 - RNA, 24 nt, Artificial Sequence
  source: /note="Description of Artificial Sequence: Synthetic oligonucleotide"
cugcacaauauuauaguuguugcu

SEQ ID NO: 670 - RNA, 24 nt, Artificial Sequence
  source: /note="Description of Artificial Sequence: Synthetic oligonucleotide"
auaaaaagagaaagauggaggaac

SEQ ID NO: 671 - RNA, 24 nt, Artificial Sequence
  source: /note="Description of Artificial Sequence: Synthetic oligonucleotide"
caccuagugaacuccauaaaaaga

SEQ ID NO: 672 - RNA, 24 nt, Artificial Sequence
  source: /note="Description of Artificial Sequence: Synthetic oligonucleotide"
auggugcaccuagugaacuccaua

SEQ ID NO: 673 - RNA, 24 nt, Artificial Sequence
  source: /note="Description of Artificial Sequence: Synthetic oligonucleotide"
aauggugcaccuagugaacuccau

SEQ ID NO: 674 - RNA, 24 nt, Artificial Sequence
  source: /note="Description of Artificial Sequence: Synthetic oligonucleotide"
gaauggugcaccuagugaacucca

SEQ ID NO: 675 - RNA, 24 nt, Artificial Sequence
  source: /note="Description of Artificial Sequence: Synthetic oligonucleotide"
gaccaaauguucagaugcaauuau

SEQ ID NO: 676 - RNA, 24 nt, Artificial Sequence
  source: /note="Description of Artificial Sequence: Synthetic oligonucleotide"
ucgcucacucacccugcaaaggac

SEQ ID NO: 677 - RNA, 24 nt, Artificial Sequence
  source: /note="Description of Artificial Sequence: Synthetic oligonucleotide"
agugagcgagaggcugcuuuggaa

SEQ ID NO: 678 - RNA, 24 nt, Artificial Sequence
  source: /note="Description of Artificial Sequence: Synthetic oligonucleotide"
gcagccucucgcucacucacccug

SEQ ID NO: 679 - RNA, 24 nt, Artificial Sequence
  source: /note="Description of Artificial Sequence: Synthetic oligonucleotide"
uugcaguaaucuaugaguuucuuc

SEQ ID NO: 680 - RNA, 24 nt, Artificial Sequence
  source: /note="Description of Artificial Sequence: Synthetic oligonucleotide"
cugcaacaguucccccuggaccug

SEQ ID NO: 681 - RNA, 24 nt, Artificial Sequence
  source: /note="Description of Artificial Sequence: Synthetic oligonucleotide"
ugcaacaguucccccuggaccugg

SEQ ID NO: 682 - RNA, 24 nt, Artificial Sequence
  source: /note="Description of Artificial Sequence: Synthetic oligonucleotide"
uuucuugccuggcuuacagaagcu

SEQ ID NO: 683 - RNA, 24 nt, Artificial Sequence
  source: /note="Description of Artificial Sequence: Synthetic oligonucleotide"
uuucagcuucuguaagccaggcaa

SEQ ID NO: 684 - RNA, 24 nt, Artificial Sequence
  source: /note="Description of Artificial Sequence: Synthetic oligonucleotide"
guccuacaggaugcuacccguaag

SEQ ID NO: 685 - RNA, 24 nt, Artificial Sequence
  source: /note="Description of Artificial Sequence: Synthetic oligonucleotide"
ggcuccuagaagacuccaagggag

SEQ ID NO: 686 - RNA, 24 nt, Artificial Sequence
  source: /note="Description of Artificial Sequence: Synthetic oligonucleotide"
gcuccuagaagacuccaagggagu

SEQ ID NO: 687 - RNA, 24 nt, Artificial Sequence
  source: /note="Description of Artificial Sequence: Synthetic oligonucleotide"
cuccaagggaguaaaagagcugau

SEQ ID NO: 688 - RNA, 24 nt, Artificial Sequence
  source: /note="Description of Artificial Sequence: Synthetic oligonucleotide"
uggauccacaagagugcuaaagcg

SEQ ID NO: 689 - RNA, 24 nt, Artificial Sequence
  source: /note="Description of Artificial Sequence: Synthetic oligonucleotide"
guucaauuggauccacaagagugc

SEQ ID NO: 690 - RNA, 24 nt, Artificial Sequence
  source: /note="Description of Artificial Sequence: Synthetic oligonucleotide"
uacuuguaacugacaagccaggga

SEQ ID NO: 691 - RNA, 24 nt, Artificial Sequence
  source: /note="Description of Artificial Sequence: Synthetic oligonucleotide"
acuuguaacugacaagccagggac

SEQ ID NO: 692 - RNA, 24 nt, Artificial Sequence
  source: /note="Description of Artificial Sequence: Synthetic oligonucleotide"
guaacugacaagccagggacaaaa

SEQ ID NO: 693 - RNA, 24 nt, Artificial Sequence
  source: /note="Description of Artificial Sequence: Synthetic oligonucleotide"
uaacugacaagccagggacaaaac

SEQ ID NO: 694 - RNA, 24 nt, Artificial Sequence
  source: /note="Description of Artificial Sequence: Synthetic oligonucleotide"
ucccuggcuugucaguuacaagua

SEQ ID NO: 695 - RNA, 24 nt, Artificial Sequence
  source: /note="Description of Artificial Sequence: Synthetic oligonucleotide"
cagaguaacagucugaguaggagc

SEQ ID NO: 696 - RNA, 24 nt, Artificial Sequence
  source: /note="Description of Artificial Sequence: Synthetic oligonucleotide"
uacuuuguuuagcaauacauggua

SEQ ID NO: 697 - RNA, 24 nt, Artificial Sequence
  source: /note="Description of Artificial Sequence: Synthetic oligonucleotide"
uggcucaaauuguuacucuucaau

SEQ ID NO: 698 - RNA, 24 nt, Artificial Sequence
  source: /note="Description of Artificial Sequence: Synthetic oligonucleotide"
cuuucaaagaacuuugcagagccu

SEQ ID NO: 699 - RNA, 24 nt, Artificial Sequence
  source: /note="Description of Artificial Sequence: Synthetic oligonucleotide"
guugaagccauuuuguugcucuuu

SEQ ID NO: 700 - RNA, 24 nt, Artificial Sequence
  source: /note="Description of Artificial Sequence: Synthetic oligonucleotide"
guugaagccauuuuauugcucuuu

SEQ ID NO: 701 - RNA, 24 nt, Artificial Sequence
  source: /note="Description of Artificial Sequence: Synthetic oligonucleotide"
uuuugaggcucugcaaaguucuuu

SEQ ID NO: 702 - RNA, 24 nt, Artificial Sequence
  source: /note="Description of Artificial Sequence: Synthetic oligonucleotide"
aguuauuaaugcauagauauucag

SEQ ID NO: 703 - RNA, 24 nt, Artificial Sequence
  source: /note="Description of Artificial Sequence: Synthetic oligonucleotide"
uauaauaugcccuguaauauaaua

SEQ ID NO: 704 - RNA, 24 nt, Artificial Sequence
  source: /note="Description of Artificial Sequence: Synthetic oligonucleotide"
uaaaggccaaaccucggcuuaccu

SEQ ID NO: 705 - RNA, 24 nt, Artificial Sequence
  source: /note="Description of Artificial Sequence: Synthetic oligonucleotide"
ucaauaucuuugaaggacucuggg

SEQ ID NO: 706 - DNA, 19 bp, Mus musculus
agagtaacagtctgactgg

SEQ ID NO: 707 - DNA, 19 bp, Mus musculus
gaaatgatcatcaaacaga

SEQ ID NO: 708 - DNA, 20 bp, Mus musculus
cactagagtaacagtctgac

SEQ ID NO: 709 - RNA, 19 nt, Artificial Sequence
  source: /note="Description of Artificial Sequence: Synthetic oligonucleotide"
ccagucagacuguuacucu

SEQ ID NO: 710 - RNA, 19 nt, Artificial Sequence
  source: /note="Description of Artificial Sequence: Synthetic oligonucleotide"
ucuguuugaugaucauuuc

SEQ ID NO: 711 - RNA, 20 nt, Artificial Sequence
  source: /note="Description of Artificial Sequence: Synthetic oligonucleotide"
gucagacuguuacucuagug

SEQ ID NO: 712 - DNA, 19 bp, Homo sapiens
agagtaacagtctgagtag

SEQ ID NO: 713 - DNA, 19 bp, Homo sapiens
gagatgatcatcaagcaga

SEQ ID NO: 714 - DNA, 20 bp, Homo sapiens
caccagagtaacagtctgag

SEQ ID NO: 715 - RNA, 19 nt, Artificial Sequence
  source: /note="Description of Artificial Sequence: Synthetic oligonucleotide"
cuacucagacuguuacucu

SEQ ID NO: 716 - RNA, 19 nt, Artificial Sequence
  source: /note="Description of Artificial Sequence: Synthetic oligonucleotide"
ucugcuugaugaucaucuc

SEQ ID NO: 717 - RNA, 20 nt, Artificial Sequence
  source: /note="Description of Artificial Sequence: Synthetic oligonucleotide"
cucagacuguuacucuggug

SEQ ID NO: 718 - DNA, 20 bp, Homo sapiens
caccagagtaacagtctgag

SEQ ID NO: 719 - DNA, 20 bp, Homo sapiens
tattttgggtttttgcaaaa

SEQ ID NO: 720 - DNA, 20 bp, Homo sapiens
agtaggagctaaaatatttt

SEQ ID NO: 721 - DNA, 20 bp, Homo sapiens
gagtaggagctaaaatattt

SEQ ID NO: 722 - DNA, 20 bp, Homo sapiens
accagagtaacagtctgagt

SEQ ID NO: 723 - DNA, 20 bp, Homo sapiens
tcctactcagactgttactc

SEQ ID NO: 724 - DNA, 20 bp, Homo sapiens
tactctggtgacacaacctg

SEQ ID NO: 725 - DNA, 20 bp, Homo sapiens
gcagtttccttagtaaccac

SEQ ID NO: 726 - DNA, 20 bp, Homo sapiens
gacacaacctgtggttacta

SEQ ID NO: 727 - DNA, 20 bp, Homo sapiens
tgtcaccagagtaacagtct

SEQ ID NO: 728 - DNA, 20 bp, Homo sapiens
aggttgtgtcaccagagtaa

SEQ ID NO: 729 - DNA, 20 bp, Homo sapiens
aaccacaggttgtgtcacca

SEQ ID NO: 730 - DNA, 20 bp, Homo sapiens
gtaaccacaggttgtgtcac

SEQ ID NO: 731 - DNA, 20 bp, Homo sapiens
atttatttttccttttattc

SEQ ID NO: 732 - DNA, 20 bp, Homo sapiens
tttccttttattctagttga

SEQ ID NO: 733 - DNA, 20 bp, Homo sapiens
tgattctgaattctttcaac

SEQ ID NO: 734 - DNA, 20 bp, Homo sapiens
aattctttcaactagaataa

SEQ ID NO: 735 - DNA, 20 bp, Homo sapiens
ttattctagttgaaagaatt

SEQ ID NO: 736 - DNA, 20 bp, Homo sapiens
tagttgaaagaattcagaat

SEQ ID NO: 737 - DNA, 20 bp, Homo sapiens
aattcagaatcagtgggatg

SEQ ID NO: 738 - DNA, 20 bp, Homo sapiens
attctttcaactagaataaa

SEQ ID NO: 739 - DNA, 20 bp, Homo sapiens
ttgaaagaattcagaatcag

SEQ ID NO: 740 - DNA, 20 bp, Homo sapiens
tgaaagaattcagaatcagt

SEQ ID NO: 741 - DNA, 20 bp, Homo sapiens
actgttgcctccggttctga

SEQ ID NO: 742 - DNA, 20 bp, Homo sapiens
cagatctgtcaaatcgcctg

SEQ ID NO: 743 - DNA, 20 bp, Homo sapiens
aaaacgccgccatttctcaa

SEQ ID NO: 744 - DNA, 20 bp, Homo sapiens
agatctgtcaaatcgcctgc

SEQ ID NO: 745 - DNA, 20 bp, Homo sapiens
tatggatcaagaaaaataga

SEQ ID NO: 746 - DNA, 20 bp, Homo sapiens
cgcctgcaggtaaaagcata

SEQ ID NO: 747 - DNA, 20 bp, Homo sapiens
atccatatgcttttacctgc

SEQ ID NO: 748 - DNA, 20 bp, Homo sapiens
ttgacagatctgttgagaaa

SEQ ID NO: 749 - DNA, 20 bp, Homo sapiens
acagatctgttgagaaatgg

SEQ ID NO: 750 - DNA, 20 bp, Homo sapiens
ggcgatttgacagatctgtt

SEQ ID NO: 751 - DNA, 20 bp, Homo sapiens
ggcgttttcattatgatata

SEQ ID NO: 752 - DNA, 20 bp, Homo sapiens
atgatataaagatatttaat

SEQ ID NO: 753 - DNA, 20 bp, Homo sapiens
gatatttaatcagtggctaa

SEQ ID NO: 754 - DNA, 20 bp, Homo sapiens
atttaatcagtggctaacag

SEQ ID NO: 755 - DNA, 20 bp, Homo sapiens
agaaactgttcagcttctgt

SEQ ID NO: 756 - DNA, 20 bp, Homo sapiens
gttttaaaatttttatatta

SEQ ID NO: 757 - DNA, 20 bp, Homo sapiens
ttttatattacagaatataa

SEQ ID NO: 758 - DNA, 20 bp, Homo sapiens
atattacagaatataaaaga

SEQ ID NO: 759 - DNA, 20 bp, Homo sapiens
gttcctgtaagataccaaaa

SEQ ID NO: 760 - DNA, 20 bp, Homo sapiens
ttgcctttttggtatcttac

SEQ ID NO: 761 - DNA, 20 bp, Homo sapiens
tggtatcttacaggaactcc

SEQ ID NO: 762 - DNA, 20 bp, Homo sapiens
atcttacaggaactccagga

SEQ ID NO: 763 - DNA, 20 bp, Homo sapiens
gccgctgcccaatgccatcc

SEQ ID NO: 764 - DNA, 20 bp, Homo sapiens
caggaactccaggatggcat

SEQ ID NO: 765 - DNA, 20 bp, Homo sapiens
aggaactccaggatggcatt

SEQ ID NO: 766 - DNA, 20 bp, Homo sapiens
tccaggatggcattgggcag

SEQ ID NO: 767 - DNA, 20 bp, Homo sapiens
gtcagaacattgaatgcaac

SEQ ID NO: 768 - DNA, 20 bp, Homo sapiens
agttcctgtaagataccaaa

SEQ ID NO: 769 - DNA, 20 bp, Homo sapiens
tgccatcctggagttcctgt

SEQ ID NO: 770 - DNA, 20 bp, Homo sapiens
ttggtatcttacaggaactc

SEQ ID NO: 771 - DNA, 20 bp, Homo sapiens
cgctgcccaatgccatcctg

SEQ ID NO: 772 - DNA, 20 bp, Homo sapiens
aactccaggatggcattggg

SEQ ID NO: 773 - DNA, 20 bp, Homo sapiens
gggcagcggcaaactgttgt

SEQ ID NO: 774 - DNA, 20 bp, Homo sapiens
agatctgtcaaatcgcctgc

SEQ ID NO: 775 - DNA, 20 bp, Homo sapiens
aatcctgcattgttgcctgt

SEQ ID NO: 776 - DNA, 20 bp, Homo sapiens
cgctgaagaaccctgatact

SEQ ID NO: 777 - DNA, 20 bp, Homo sapiens
gaacaaatatcccttagtat

SEQ ID NO: 778 - DNA, 20 bp, Homo sapiens
ctgtaagaacaaatatccct

SEQ ID NO: 779 - DNA, 20 bp, Homo sapiens
ctaagggatatttgttctta

SEQ ID NO: 780 - DNA, 20 bp, Homo sapiens
tgttcttacaggcaacaatg

SEQ ID NO: 781 - DNA, 20 bp, Homo sapiens
caacaatgcaggatttggaa

SEQ ID NO: 782 - DNA, 20 bp, Homo sapiens
acaatgcaggatttggaaca

SEQ ID NO: 783 - DNA, 20 bp, Homo sapiens
atttggaacagaggcgtccc

SEQ ID NO: 784 - DNA, 20 bp, Homo sapiens
acagaggcgtccccagttgg

SEQ ID NO: 785 - DNA, 20 bp, Homo sapiens
tatttttttattttgcattt

SEQ ID NO: 786 - DNA, 20 bp, Homo sapiens
ttattttgcattttagatga

SEQ ID NO: 787 - DNA, 20 bp, Homo sapiens
attttgcattttagatgaaa

SEQ ID NO: 788 - DNA, 20 bp, Homo sapiens
ttgcattttagatgaaagag

SEQ ID NO: 789 - DNA, 20 bp, Homo sapiens
atgaaagagaagatgttcaa

SEQ ID NO: 790 - RNA, 20 nt, Artificial Sequence
  source: /note="Description of Artificial Sequence: Synthetic oligonucleotide"
cuacucagacuguuacucug

SEQ ID NO: 791 - RNA, 20 nt, Artificial Sequence
  source: /note="Description of Artificial Sequence: Synthetic oligonucleotide"
cucagacuguuacucuggug

SEQ ID NO: 792 - RNA, 20 nt, Artificial Sequence
  source: /note="Description of Artificial Sequence: Synthetic oligonucleotide"
uuuugcaaaaacccaaaaua

SEQ ID NO: 793 - RNA, 20 nt, Artificial Sequence
  source: /note="Description of Artificial Sequence: Synthetic oligonucleotide"
aaaauauuuuagcuccuacu

SEQ ID NO: 794 - RNA, 20 nt, Artificial Sequence
  source: /note="Description of Artificial Sequence: Synthetic oligonucleotide"
aaauauuuuagcuccuacuc

SEQ ID NO: 795 - RNA, 20 nt, Artificial Sequence
  source: /note="Description of Artificial Sequence: Synthetic oligonucleotide"
acucagacuguuacucuggu

SEQ ID NO: 796 - RNA, 20 nt, Artificial Sequence
  source: /note="Description of Artificial Sequence: Synthetic oligonucleotide"
gaguaacagucugaguagga

SEQ ID NO: 797 - RNA, 20 nt, Artificial Sequence
  source: /note="Description of Artificial Sequence: Synthetic oligonucleotide"
cagguugugucaccagagua

SEQ ID NO: 798 - RNA, 20 nt, Artificial Sequence
  source: /note="Description of Artificial Sequence: Synthetic oligonucleotide"
gugguuacuaaggaaacugc

SEQ ID NO: 799 - RNA, 20 nt, Artificial Sequence
  source: /note="Description of Artificial Sequence: Synthetic oligonucleotide"
uaguaaccacagguuguguc

SEQ ID NO: 800 - RNA, 20 nt, Artificial Sequence
  source: /note="Description of Artificial Sequence: Synthetic oligonucleotide"
agacuguuacucuggugaca

SEQ ID NO: 801 - RNA, 20 nt, Artificial Sequence
  source: /note="Description of Artificial Sequence: Synthetic oligonucleotide"
uuacucuggugacacaaccu

SEQ ID NO: 802 - RNA, 20 nt, Artificial Sequence
  source: /note="Description of Artificial Sequence: Synthetic oligonucleotide"
uggugacacaaccugugguu

SEQ ID NO: 803 - RNA, 20 nt, Artificial Sequence
  source: /note="Description of Artificial Sequence: Synthetic oligonucleotide"
gugacacaaccugugguuac

SEQ ID NO: 804 - RNA, 20 nt, Artificial Sequence
  source: /note="Description of Artificial Sequence: Synthetic oligonucleotide"
gaauaaaaggaaaaauaaau

SEQ ID NO: 805 - RNA, 20 nt, Artificial Sequence
  source: /note="Description of Artificial Sequence: Synthetic oligonucleotide"
ucaacuagaauaaaaggaaa

SEQ ID NO: 806 - RNA, 20 nt, Artificial Sequence
  source: /note="Description of Artificial Sequence: Synthetic oligonucleotide"
guugaaagaauucagaauca

SEQ ID NO: 807 - RNA, 20 nt, Artificial Sequence
  source: /note="Description of Artificial Sequence: Synthetic oligonucleotide"
uuauucuaguugaaagaauu

SEQ ID NO: 808 - RNA, 20 nt, Artificial Sequence
  source: /note="Description of Artificial Sequence: Synthetic oligonucleotide"
aauucuuucaacuagaauaa

SEQ ID NO: 809 - RNA, 20 nt, Artificial Sequence
  source: /note="Description of Artificial Sequence: Synthetic oligonucleotide"
auucugaauucuuucaacua

SEQ ID NO: 810 - RNA, 20 nt, Artificial Sequence
  source: /note="Description of Artificial Sequence: Synthetic oligonucleotide"
caucccacugauucugaauu

SEQ ID NO: 811 - RNA, 20 nt, Artificial Sequence
  source: /note="Description of Artificial Sequence: Synthetic oligonucleotide"
uuuauucuaguugaaagaau

SEQ ID NO: 812 - RNA, 20 nt, Artificial Sequence
  source: /note="Description of Artificial Sequence: Synthetic oligonucleotide"
cugauucugaauucuuucaa

SEQ ID NO: 813 - RNA, 20 nt, Artificial Sequence
  source: /note="Description of Artificial Sequence: Synthetic oligonucleotide"
acugauucugaauucuuuca

SEQ ID NO: 814 - RNA, 20 nt, Artificial Sequence
  source: /note="Description of Artificial Sequence: Synthetic oligonucleotide"
ucagaaccggaggcaacagu

SEQ ID NO: 815 - RNA, 20 nt, Artificial Sequence
  source: /note="Description of Artificial Sequence: Synthetic oligonucleotide"
caggcgauuugacagaucug

SEQ ID NO: 816 - RNA, 20 nt, Artificial Sequence
  source: /note="Description of Artificial Sequence: Synthetic oligonucleotide"
uugagaaauggcggcguuuu

SEQ ID NO: 817 - RNA, 20 nt, Artificial Sequence
  source: /note="Description of Artificial Sequence: Synthetic oligonucleotide"
gcaggcgauuugacagaucu

SEQ ID NO: 818 - RNA, 20 nt, Artificial Sequence
  source: /note="Description of Artificial Sequence: Synthetic oligonucleotide"
ucuauuuuucuugauccaua

SEQ ID NO: 819 - RNA, 20 nt, Artificial Sequence
  source: /note="Description of Artificial Sequence: Synthetic oligonucleotide"
uaugcuuuuaccugcaggcg

SEQ ID NO: 820 - RNA, 20 nt, Artificial Sequence
  source: /note="Description of Artificial Sequence: Synthetic oligonucleotide"
gcagguaaaagcauauggau

SEQ ID NO: 821 - RNA, 20 nt, Artificial Sequence
  source: /note="Description of Artificial Sequence: Synthetic oligonucleotide"
uuucucaacagaucugucaa

SEQ ID NO: 822 - RNA, 20 nt, Artificial Sequence
  source: /note="Description of Artificial Sequence: Synthetic oligonucleotide"
ccauuucucaacagaucugu

SEQ ID NO: 823 - RNA, 20 nt, Artificial Sequence
  source: /note="Description of Artificial Sequence: Synthetic oligonucleotide"
aacagaucugucaaaucgcc

SEQ ID NO: 824 - RNA, 20 nt, Artificial Sequence
  source: /note="Description of Artificial Sequence: Synthetic oligonucleotide"
uauaucauaaugaaaacgcc

SEQ ID NO: 825 - RNA, 20 nt, Artificial Sequence
  source: /note="Description of Artificial Sequence: Synthetic oligonucleotide"
auuaaauaucuuuauaucau

SEQ ID NO: 826 - RNA, 20 nt, Artificial Sequence
  source: /note="Description of Artificial Sequence: Synthetic oligonucleotide"
uuagccacugauuaaauauc

SEQ ID NO: 827 - RNA, 20 nt, Artificial Sequence
  source: /note="Description of Artificial Sequence: Synthetic oligonucleotide"
cuguuagccacugauuaaau

SEQ ID NO: 828 - RNA, 20 nt, Artificial Sequence
  source: /note="Description of Artificial Sequence: Synthetic oligonucleotide"
acagaagcugaacaguuucu

SEQ ID NO: 829 - RNA, 20 nt, Artificial Sequence
  source: /note="Description of Artificial Sequence: Synthetic oligonucleotide"
uaauauaaaaauuuuaaaac

SEQ ID NO: 830 - RNA, 20 nt, Artificial Sequence
  source: /note="Description of Artificial Sequence: Synthetic oligonucleotide"
uuauauucuguaauauaaaa

SEQ ID NO: 831 - RNA, 20 nt, Artificial Sequence
  source: /note="Description of Artificial Sequence: Synthetic oligonucleotide"
ucuuuuauauucuguaauau

SEQ ID NO: 832 - RNA, 20 nt, Artificial Sequence
  source: /note="Description of Artificial Sequence: Synthetic oligonucleotide"
uuuugguaucuuacaggaac

SEQ ID NO: 833 - RNA, 20 nt, Artificial Sequence
  source: /note="Description of Artificial Sequence: Synthetic oligonucleotide"
guaagauaccaaaaaggcaa

SEQ ID NO: 834 - RNA, 20 nt, Artificial Sequence
  source: /note="Description of Artificial Sequence: Synthetic oligonucleotide"
ggaguuccuguaagauacca

SEQ ID NO: 835 - RNA, 20 nt, Artificial Sequence
  source: /note="Description of Artificial Sequence: Synthetic oligonucleotide"
uccuggaguuccuguaagau

SEQ ID NO: 836 - RNA, 20 nt, Artificial Sequence
  source: /note="Description of Artificial Sequence: Synthetic oligonucleotide"
ggauggcauugggcagcggc

SEQ ID NO: 837 - RNA, 20 nt, Artificial Sequence
  source: /note="Description of Artificial Sequence: Synthetic oligonucleotide"
augccauccuggaguuccug

SEQ ID NO: 838 - RNA, 20 nt, Artificial Sequence
  source: /note="Description of Artificial Sequence: Synthetic oligonucleotide"
aaugccauccuggaguuccu

SEQ ID NO: 839 - RNA, 20 nt, Artificial Sequence
  source: /note="Description of Artificial Sequence: Synthetic oligonucleotide"
cugcccaaugccauccugga

SEQ ID NO: 840 - RNA, 20 nt, Artificial Sequence
  source: /note="Description of Artificial Sequence: Synthetic oligonucleotide"
guugcauucaauguucugac

SEQ ID NO: 841 - RNA, 20 nt, Artificial Sequence
  source: /note="Description of Artificial Sequence: Synthetic oligonucleotide"
uuugguaucuuacaggaacu

SEQ ID NO: 842 - RNA, 20 nt, Artificial Sequence
  source: /note="Description of Artificial Sequence: Synthetic oligonucleotide"
acaggaacuccaggauggca

SEQ ID NO: 843 - RNA, 20 nt, Artificial Sequence
  source: /note="Description of Artificial Sequence: Synthetic oligonucleotide"
gaguuccuguaagauaccaa

SEQ ID NO: 844 - RNA, 20 nt, Artificial Sequence
  source: /note="Description of Artificial Sequence: Synthetic oligonucleotide"
caggauggcauugggcagcg

SEQ ID NO: 845 - RNA, 20 nt, Artificial Sequence
  source: /note="Description of Artificial Sequence: Synthetic oligonucleotide"
cccaaugccauccuggaguu

SEQ ID NO: 846 - RNA, 20 nt, Artificial Sequence
  source: /note="Description of Artificial Sequence: Synthetic oligonucleotide"
acaacaguuugccgcugccc

SEQ ID NO: 847 - RNA, 20 nt, Artificial Sequence
  source: /note="Description of Artificial Sequence: Synthetic oligonucleotide"
gcaggcgauuugacagaucu

SEQ ID NO: 848 - RNA, 20 nt, Artificial Sequence
  source: /note="Description of Artificial Sequence: Synthetic oligonucleotide"
acaggcaacaaugcaggauu

SEQ ID NO: 849 - RNA, 20 nt, Artificial Sequence
  source: /note="Description of Artificial Sequence: Synthetic oligonucleotide"
aguaucaggguucuucagcg

SEQ ID NO: 850 - RNA, 20 nt, Artificial Sequence
  source: /note="Description of Artificial Sequence: Synthetic oligonucleotide"
auacuaagggauauuuguuc

SEQ ID NO: 851 - RNA, 20 nt, Artificial Sequence
  source: /note="Description of Artificial Sequence: Synthetic oligonucleotide"
agggauauuuguucuuacag

SEQ ID NO: 852 - RNA, 20 nt, Artificial Sequence
  source: /note="Description of Artificial Sequence: Synthetic oligonucleotide"
uaagaacaaauaucccuuag

SEQ ID NO: 853 - RNA, 20 nt, Artificial Sequence
  source: /note="Description of Artificial Sequence: Synthetic oligonucleotide"
cauuguugccuguaagaaca

SEQ ID NO: 854 - RNA, 20 nt, Artificial Sequence
  source: /note="Description of Artificial Sequence: Synthetic oligonucleotide"
uuccaaauccugcauuguug

SEQ ID NO: 855 - RNA, 20 nt, Artificial Sequence
  source: /note="Description of Artificial Sequence: Synthetic oligonucleotide"
uguuccaaauccugcauugu

SEQ ID NO: 856 - RNA, 20 nt, Artificial Sequence
  source: /note="Description of Artificial Sequence: Synthetic oligonucleotide"
gggacgccucuguuccaaau

SEQ ID NO: 857 - RNA, 20 nt, Artificial Sequence
  source: /note="Description of Artificial Sequence: Synthetic oligonucleotide"
ccaacuggggacgccucugu

SEQ ID NO: 858 - RNA, 20 nt, Artificial Sequence
  source: /note="Description of Artificial Sequence: Synthetic oligonucleotide"
acagaggcguccccaguugg

SEQ ID NO: 859 - RNA, 20 nt, Artificial Sequence
  source: /note="Description of Artificial Sequence: Synthetic oligonucleotide"
ucaucuaaaaugcaaaauaa

SEQ ID NO: 860 - RNA, 20 nt, Artificial Sequence
  source: /note="Description of Artificial Sequence: Synthetic oligonucleotide"
uuucaucuaaaaugcaaaau

SEQ ID NO: 861 - RNA, 20 nt, Artificial Sequence
  source: /note="Description of Artificial Sequence: Synthetic oligonucleotide"
cucuuucaucuaaaaugcaa

SEQ ID NO: 862 - RNA, 20 nt, Artificial Sequence
  source: /note="Description of Artificial Sequence: Synthetic oligonucleotide"
uugaacaucuucucuuucau

SEQ ID NO: 863 - DNA, 20 bp, Canis lupis
caccagagtaacagtctgac

SEQ ID NO: 864 - RNA, 20 nt, Artificial Sequence
  source: /note="Description of Artificial Sequence: Synthetic oligonucleotide"
gucagacuguuacucuggug

SEQ ID NO: 865 - DNA, 8969 bp, Homo sapiens
actttccccctacaggactcagatctgggaggcaattaccttcggagaaaaacgaataggaaaaactgaagtgttactttttttaaagctgctgaagtttgttggtttctcattgtttttaagcctactggagcaataaagtttgaagaacttttaccaggttttttttatcgctgccttgatatacacttttcaaaatgctttggtgggaagaagtagaggactgttatgaaagagaagatgttcaaaagaaaacattcacaaaatgggtaaatgcacaattttctaagtttgggaagcagcatattgagaacctcttcagtgacctacaggatgggaggcgcctcctagacctcctcgaaggcctgacagggcaaaaactgccaaaagaaaaaggatccacaagagttcatgccctgaacaatgtcaacaaggcactgcgggttttgcagaacaataatgttgatttagtgaatattggaagtactgacatcgtagatggaaatcataaactgactcttggtttgatttggaatataatcctccactggcaggtcaaaaatgtaatgaaaaatatcatggctggattgcaacaaaccaacagtgaaaagattctcctgagctgggtccgacaatcaactcgtaattatccacaggttaatgtaatcaacttcaccaccagctggtctgatggcctggctttgaatgctctcatccatagtcataggccagacctatttgactggaatagtgtggtttgccagcagtcagccacacaacgactggaacatgcattcaacatcgccagatatcaattaggcatagagaaactactcgatcctgaagatgttgataccacctatccagataagaagtccatcttaatgtacatcacatcactcttccaagttttgcctcaacaagtgagcattgaagccatccaggaagtggaaatgttgccaaggccacctaaagtgactaaagaagaacattttcagttacatcatcaaatgcactattctcaacagatcacggtcagtctagcacagggatatgagagaacttcttcccctaagcctcgattcaagagctatgcctacacacaggctgcttatgtcaccacctctgaccctacacggagcccatttccttcacagcatttggaagctcctgaagacaagtcatttggcagttcattgatggagagtgaagtaaacctggaccgttatcaaacagctttagaagaagtattatcgtggcttctttctgctgaggacacattgcaagcacaaggagagatttctaatgatgtggaagtggtgaaagaccagtttcatactcatgaggggtacatgatggatttgacagcccatcagggccgggttggtaatattctacaattgggaagtaagctgattggaacaggaaaattatcagaagatgaagaaactgaagtacaagagcagatgaatctcctaaattcaagatgggaatgcctcagggtagctagcatggaaaaacaaagcaatttacatagagttttaatggatctccagaatcagaaactgaaagagttgaatgactggctaacaaaaacagaagaaagaacaaggaaaatggaggaagagcctcttggacctgatcttgaagacctaaaacgccaagtacaacaacataaggtgcttcaagaagatctagaacaagaacaagtcagggtcaattctctcactcacatggtggtggtagttgatgaatctagtggagatcacgcaactgctgctttggaagaacaacttaaggtattgggagatcgatgggcaaacatctgtagatggacagaagaccgctgggttcttttacaagacatccttctcaaatggcaacgtcttactgaagaacagtgcctttttagtgcatggctttcagaaaaagaagatgcagtgaacaagattcacacaactggctttaaagatcaaaatgaaatgttatcaagtcttcaaaaactggccgttttaaaagcggatctagaaaagaaaaagcaatccatgggcaaactgtattcactcaaacaagatcttctttcaacactgaagaataagtcagtgacccagaagacggaagcatggctggataactttgcccggtgttgggataatttagtccaaaaacttgaaaagagtacagcacagatttcacaggctgtcaccaccactcagccatcactaacacagacaactgtaatggaaacagtaactacggtgaccacaagggaacagatcctggtaaagcatgctcaagaggaacttccaccaccacctccccaaaagaagaggcagattactgtggattctgaaattaggaaaaggttggatgttgatataactgaacttcacagctggattactcgctcagaagctgtgttgcagagtcctgaatttgcaatctttcggaaggaaggcaacttctcagacttaaaagaaaaagtcaatgccatagagcgagaaaaagctgagaagttcagaaaactgcaagatgccagcagatcagctcaggccctggtggaacagatggtgaatgagggtgttaatgcagatagcatcaaacaagcctcagaacaactgaacagccggtggatcgaattctgccagttgctaagtgagagacttaactggctggagtatcagaacaacatcatcgctttctataatcagctacaacaattggagcagatgacaactactgctgaaaactggttgaaaatccaacccaccaccccatcagagccaacagcaattaaaagtcagttaaaaatttgtaaggatgaagtcaaccggctatcagatcttcaacctcaaattgaacgattaaaaattcaaagcatagccctgaaagagaaaggacaaggacccatgttcctggatgcagactttgtggcctttacaaatcattttaagcaagtcttttctgatgtgcaggccagagagaaagagctacagacaatttttgacactttgccaccaatgcgctatcaggagaccatgagtgccatcaggacatgggtccagcagtcagaaaccaaactctccatacctcaacttagtgtcaccgactatgaaatcatggagcagagactcggggaattgcaggctttacaaagttctctgcaagagcaacaaagtggcctatactatctcagcaccactgtgaaagagatgtcgaagaaagcgccctctgaaattagccggaaatatcaatcagaatttgaagaaattgagggacgctggaagaagctctcctcccagctggttgagcattgtcaaaagctagaggagcaaatgaataaactccgaaaaattcagaatcacatacaaaccctgaagaaatggatggctgaagttgatgtttttctgaaggaggaatggcctgcccttggggattcagaaattctaaaaaagcagctgaaacagtgcagacttttagtcagtgatattcagacaattcagcccagtctaaacagtgtcaatgaaggtgggcagaagataaagaatgaagcagagccagagtttgcttcgagacttgagacagaactcaaagaacttaacactcagtgggatcacatgtgccaacaggtctatgccagaaaggaggccttgaagggaggtttggagaaaactgtaagcctccagaaagatctatcagagatgcacgaatggatgacacaagctgaagaagagtatcttgagagagattttgaatataaaactccagatgaattacagaaagcagttgaagagatgaagagagctaaagaagaggcccaacaaaaagaagcgaaagtgaaactccttactgagtctgtaaatagtgtcatagctcaagctccacctgtagcacaagaggccttaaaaaaggaacttgaaactctaaccaccaactaccagtggctctgcactaggctgaatgggaaatgcaagactttggaagaagtttgggcatgttggcatgagttattgtcatacttggagaaagcaaacaagtggctaaatgaagtagaatttaaacttaaaaccactgaaaacattcctggcggagctgaggaaatctctgaggtgctagattcacttgaaaatttgatgcgacattcagaggataacccaaatcagattcgcatattggcacagaccctaacagatggcggagtcatggatgagctaatcaatgaggaacttgagacatttaattctcgttggagggaactacatgaagaggctgtaaggaggcaaaagttgcttgaacagagcatccagtctgcccaggagactgaaaaatccttacacttaatccaggagtccctcacattcattgacaagcagttggcagcttatattgcagacaaggtggacgcagctcaaatgcctcaggaagcccagaaaatccaatctgatttgacaagtcatgagatcagtttagaagaaatgaagaaacataatcaggggaaggaggctgcccaaagagtcctgtctcagattgatgttgcacagaaaaaattacaagatgtctccatgaagtttcgattattccagaaaccagccaattttgagcagcgtctacaagaaagtaagatgattttagatgaagtgaagatgcacttgcctgcattggaaacaaagagtgtggaacaggaagtagtacagtcacagctaaatcattgtgtgaacttgtataaaagtctgagtgaagtgaagtctgaagtggaaatggtgataaagactggacgtcagattgtacagaaaaagcagacggaaaatcccaaagaacttgatgaaagagtaacagctttgaaattgcattataatgagctgggagcaaaggtaacagaaagaaagcaacagttggagaaatgcttgaaattgtcccgtaagatgcgaaaggaaatgaatgtcttgacagaatggctggcagctacagatatggaattgacaaagagatcagcagttgaaggaatgcctagtaatttggattctgaagttgcctggggaaaggctactcaaaaagagattgagaaacagaaggtgcacctgaagagtatcacagaggtaggagaggccttgaaaacagttttgggcaagaaggagacgttggtggaagataaactcagtcttctgaatagtaactggatagctgtcacctcccgagcagaagagtggttaaatcttttgttggaataccagaaacacatggaaacttttgaccagaatgtggaccacatcacaaagtggatcattcaggctgacacacttttggatgaatcagagaaaaagaaaccccagcaaaaagaagacgtgcttaagcgtttaaaggcagaactgaatgacatacgcccaaaggtggactctacacgtgaccaagcagcaaacttgatggcaaaccgcggtgaccactgcaggaaattagtagagccccaaatctcagagctcaaccatcgatttgcagccatttcacacagaattaagactggaaaggcctccattcctttgaaggaattggagcagtttaactcagatatacaaaaattgcttgaaccactggaggctgaaattcagcagggggtgaatctgaaagaggaagacttcaataaagatatgaatgaagacaatgagggtactgtaaaagaattgttgcaaagaggagacaacttacaacaaagaatcacagatgagagaaagcgagaggaaataaagataaaacagcagctgttacagacaaaacataatgctctcaaggatttgaggtctcaaagaagaaaaaaggctctagaaatttctcatcagtggtatcagtacaagaggcaggctgatgatctcctgaaatgcttggatgacattgaaaaaaaattagccagcctacctgagcccagagatgaaaggaaaataaaggaaattgatcgggaattgcagaagaagaaagaggagctgaatgcagtgcgtaggcaagctgagggcttgtctgaggatggggccgcaatggcagtggagccaactcagatccagctcagcaagcgctggcgggaaattgagagcaaatttgctcagtttcgaagactcaactttgcacaaattcacactgtccgtgaagaaacgatgatggtgatgactgaagacatgcctttggaaatttcttatgtgccttctacttatttgactgaaatcactcatgtctcacaagccctattagaagtggaacaacttctcaatgctcctgacctctgtgctaaggactttgaagatctctttaagcaagaggagtctctgaagaatataaaagatagtctacaacaaagctcaggtcggattgacattattcatagcaagaagacagcagcattgcaaagtgcaacgcctgtggaaagggtgaagctacaggaagctctctcccagcttgatttccaatgggaaaaagttaacaaaatgtacaaggaccgacaagggcgatttgacagatctgttgagaaatggcggcgttttcattatgatataaagatatttaatcagtggctaacagaagctgaacagtttctcagaaagacacaaattcctgagaattgggaacatgctaaatacaaatggtatcttaagatctccgagaggcagaaaaaggggaactgtgcaacccttttgtccttctggatctcaaaatgaagggatacattctgctacatgaaatgtggaattaagaccatgatgcaacatgataaacaacacaaatttgggggtgtctctgtgctatacattattgaatttttccatgctatacactttttggatgtgtctgtgctatttattcagtttttttaaataaaagtttttgtagactaaattgccctctctactttgcatcgtttttgaacaaaggattttcaagactgataagctcaaatgtatcatttattgtattcaagtagcattcaatttttctttagaagtataatttgtagatattttaacacagaaaacttgcaacactgctcatgataggcacttattatatattttttgaaagactatatggataatgattctaactttgacttttcctgttttgccttcactttagaattaagcagagaatcaaatccatattcctgggggcgatgcttggacaacagtatctctttaaagatctttgtgtgagtcgaaggtgcagccagactgggagttattgtgaagaaacagattcaggaaggttgagaaacttgcctaaggctaatcagatagttactggcaatgttgtttctaaatcactgtttggctccctcattcaatgaatctacactatgtgggactgcctcttgctcctgacatcttttgctgctgaaataaatgaactcaaagcctagaaggtagaaaagagggagttcagaattatattcaggcacaaataccaataaggctattgcccccagaactgcaacttctcttggtttaacagataactatttagctgtgaggtacaactgaggaagtggacacacaagttatcaggagattctgatgtgccagtttatatttcttgtcacaggtaatgattcgaaatttcttaaaacagctgtcctcacagtggagtaacctgggagtacatgaaggcattccaaggagtaggcacagatagttttaagggaatttatttctagatcttctactttattttgtactcttcctgaaaactgaattgcctgaaaaaaaaaaaaaaaaaaaaaagacatctgtagtcaagacctcaggctgtttctcctttctaaccacttgccttttctaaccacttctcccaatttaagaaaaaaagccttatatttcatccaactctgatcttactaaggcttcaaacaaaagaagcatgaatgactttcatgacagggcaacatagctttttgcaagaagagtggttgctaactctttgctttcaactgaacccgaagagaagacctgataagttgtcagccgatagatcattaaaaatacgttttggtaagcaatcatcatgtacttttagcatatgccatagcaggagcacaaatgattaagcaatgctactataatacaattccttccgtttctttctactcacctatttgaataagatttttcatcatttacatctatacagacaaaaattagggatagaattgatgctgaagcctttccaattgtagaattaatttatattcttctgaaggtgtataaattgttaaatacccatccatcttattaagagatgtattttcaataaaattttatttttatgtttatcaaattttataatatacatatattgttttggtcaattgcacgttaataattgtaacaatacctcaattgaaaaggtttgttttttacatttaggacttacagtaacagaaaaaaaacactcattgtgtatacatactgtttaagaaaagtatactaggtgatcaataagattttttcaggcataaacatatatcttagttttaagatatcgatatttacaatgtccctcaaattatattattttcagtcatttaagaatgaaaagtacatttcgaatgcggattttaaatctgcaagggttgactcatttttcaagagtctttttaggggatacagaagcaagaatgtttggagttccctgatcagtatctttaagagaaggtatttgttggtagttcctagcaaattccaacagcctgatgctacttaaaagataatagtaattattttaaataatgcttctgataaaaaacattcatgcacactcagtttaaaaagatatttaaacatttgtagttgtagtttgggaactcatgatacaagtacagtctgtaaatgaagctcttagtttgcaaatatcagagataagctattaaaatgcagaaattgaaattgccctgatatatgcataaattagtgtcatctccatcttgtcagttagag

SEQ ID NO: 866 - protein, 2166 aa, Homo sapiens
MLWWEEVEDCYEREDVQKKTFTKWVNAQFSKFGKQHIENLFSDLQDGRRLLDLLEGLTGQKLPKEKGSTRVHALNNVNKALRVLQNNNVDLVNIGSTDIVDGNHKLTLGLIWNIILHWQVKNVMKNIMAGLQQTNSEKILLSWVRQSTRNYPQVNVINFTTSWSDGLALNALIHSHRPDLFDWNSVVCQQSATQRLEHAFNIARYQLGIEKLLDPEDVDTTYPDKKSILMYITSLFQVLPQQVSIEAIQEVEMLPRPPKVTKEEHFQLHHQMHYSQQITVSLAQGYERTSSPKPRFKSYAYTQAAYVTTSDPTRSPFPSQHLEAPEDKSFGSSLMESEVNLDRYQTALEEVLSWLLSAEDTLQAQGEISNDVEVVKDQFHTHEGYMMDLTAHQGRVGNILQLGSKLIGTGKLSEDEETEVQEQMNLLNSRWECLRVASMEKQSNLHRVLMDLQNQKLKELNDWLTKTEERTRKMEEEPLGPDLEDLKRQVQQHKVLQEDLEQEQVRVNSLTHMVVVVDESSGDHATAALEEQLKVLGDRWANICRWTEDRWVLLQDILLKWQRLTEEQCLFSAWLSEKEDAVNKIHTTGFKDQNEMLSSLQKLAVLKADLEKKKQSMGKLYSLKQDLLSTLKNKSVTQKTEAWLDNFARCWDNLVQKLEKSTAQISQAVTTTQPSLTQTTVMETVTTVTTREQILVKHAQEELPPPPPQKKRQITVDSEIRKRLDVDITELHSWITRSEAVLQSPEFAIFRKEGNFSDLKEKVNAIEREKAEKFRKLQDASRSAQALVEQMVNEGVNADSIKQASEQLNSRWIEFCQLLSERLNWLEYQNNIIAFYNQLQQLEQMTTTAENWLKIQPTTPSEPTAIKSQLKICKDEVNRLSDLQPQIERLKIQSIALKEKGQGPMFLDADFVAFTNHFKQVFSDVQAREKELQTIFDTLPPMRYQETMSAIRTWVQQSETKLSIPQLSVTDYEIMEQRLGELQALQSSLQEQQSGLYYLSTTVKEMSKKAPSEISRKYQSEFEEIEGRWKKLSSQLVEHCQKLEEQMNKLRKIQNHIQTLKKWMAEVDVFLKEEWPALGDSEILKKQLKQCRLLVSDIQTIQPSLNSVNEGGQKIKNEAEPEFASRLETELKELNTQWDHMCQQVYARKEALKGGLEKTVSLQKDLSEMHEWMTQAEEEYLERDFEYKTPDELQKAVEEMKRAKEEAQQKEAKVKLLTESVNSVIAQAPPVAQEALKKELETLTTNYQWLCTRLNGKCKTLEEVWACWHELLSYLEKANKWLNEVEFKLKTTENIPGGAEEISEVLDSLENLMRHSEDNPNQIRILAQTLTDGGVMDELINEELETFNSRWRELHEEAVRRQKLLEQSIQSAQETEKSLHLIQESLTFIDKQLAAYIADKVDAAQMPQEAQKIQSDLTSHEISLEEMKKHNQGKEAAQRVLSQIDVAQKKLQDVSMKFRLFQKPANFEQRLQESKMILDEVKMHLPALETKSVEQEVVQSQLNHCVNLYKSLSEVKSEVEMVIKTGRQIVQKKQTENPKELDERVTALKLHYNELGAKVTERKQQLEKCLKLSRKMRKEMNVLTEWLAATDMELTKRSAVEGMPSNLDSEVAWGKATQKEIEKQKVHLKSITEVGEALKTVLGKKETLVEDKLSLLNSNWIAVTSRAEEWLNLLLEYQKHMETFDQNVDHITKWIIQADTLLDESEKKKPQQKEDVLKRLKAELNDIRPKVDSTRDQAANLMANRGDHCRKLVEPQISELNHRFAAISHRIKTGKASIPLKELEQFNSDIQKLLEPLEAEIQQGVNLKEEDFNKDMNEDNEGTVKELLQRGDNLQQRITDERKREEIKIKQQLLQTKHNALKDLRSQRRKKALEISHQWYQYKRQADDLLKCLDDIEKKLASLPEPRDERKIKEIDRELQKKKEELNAVRRQAEGLSEDGAAMAVEPTQIQLSKRWREIESKFAQFRRLNFAQIHTVREETMMVMTEDMPLEISYVPSTYLTEITHVSQALLEVEQLLNAPDLCAKDFEDLFKQEESLKNIKDSLQQSSGRIDIIHSKKTAALQSATPVERVKLQEALSQLDFQWEKVNKMYKDRQGRFDRSVEKWRRFHYDIKIFNQWLTEAEQFLRKTQIPENWEHAKYKWYLKISERQKKGNCATLLSFWISK

SEQ ID NO: 867 - DNA, 6156 bp, Homo sapiens
actttccccctacaggactcagatctgggaggcaattaccttcggagaaaaacgaataggaaaaactgaagtgttactttttttaaagctgctgaagtttgttggtttctcattgtttttaagcctactggagcaataaagtttgaagaacttttaccaggttttttttatcgctgccttgatatacacttttcaaaatgctttggtgggaagaagtagaggactgttatgaaagagaagatgttcaaaagaaaacattcacaaaatgggtaaatgcacaattttctaagtttgggaagcagcatattgagaacctcttcagtgacctacaggatgggaggcgcctcctagacctcctcgaaggcctgacagggcaaaaactgccaaaagaaaaaggatccacaagagttcatgccctgaacaatgtcaacaaggcactgcgggttttgcagaacaataatgttgatttagtgaatattggaagtactgacatcgtagatggaaatcataaactgactcttggtttgatttggaatataatcctccactggcaggtcaaaaatgtaatgaaaaatatcatggctggattgcaacaaaccaacagtgaaaagattctcctgagctgggtccgacaatcaactcgtaattatccacaggttaatgtaatcaacttcaccaccagctggtctgatggcctggctttgaatgctctcatccatagtcataggccagacctatttgactggaatagtgtggtttgccagcagtcagccacacaacgactggaacatgcattcaacatcgccagatatcaattaggcatagagaaactactcgatcctgaagatgttgataccacctatccagataagaagtccatcttaatgtacatcacatcactcttccaagttttgcctcaacaagtgagcattgaagccatccaggaagtggaaatgttgccaaggccacctaaagtgactaaagaagaacattttcagttacatcatcaaatgcactattctcaacagatcacggtcagtctagcacagggatatgagagaacttcttcccctaagcctcgattcaagagctatgcctacacacaggctgcttatgtcaccacctctgaccctacacggagcccatttccttcacagcatttggaagctcctgaagacaagtcatttggcagttcattgatggagagtgaagtaaacctggaccgttatcaaacagctttagaagaagtattatcgtggcttctttctgctgaggacacattgcaagcacaaggagagatttctaatgatgtggaagtggtgaaagaccagtttcatactcatgaggggtacatgatggatttgacagcccatcagggccgggttggtaatattctacaattgggaagtaagctgattggaacaggaaaattatcagaagatgaagaaactgaagtacaagagcagatgaatctcctaaattcaagatgggaatgcctcagggtagctagcatggaaaaacaaagcaatttacatagagttttaatggatctccagaatcagaaactgaaagagttgaatgactggctaacaaaaacagaagaaagaacaaggaaaatggaggaagagcctcttggacctgatcttgaagacctaaaacgccaagtacaacaacataaggtgcttcaagaagatctagaacaagaacaagtcagggtcaattctctcactcacatggtggtggtagttgatgaatctagtggagatcacgcaactgctgctttggaagaacaacttaaggtattgggagatcgatgggcaaacatctgtagatggacagaagaccgctgggttcttttacaagacatccttctcaaatggcaacgtcttactgaagaacagtgcctttttagtgcatggctttcagaaaaagaagatgcagtgaacaagattcacacaactggctttaaagatcaaaatgaaatgttatcaagtcttcaaaaactggccgttttaaaagcggatctagaaaagaaaaagcaatccatgggcaaactgtattcactcaaacaagatcttctttcaacactgaagaataagtcagtgacccagaagacggaagcatggctggataactttgcccggtgttgggataatttagtccaaaaacttgaaaagagtacagcacagatttcacaggctgtcaccaccactcagccatcactaacacagacaactgtaatggaaacagtaactacggtgaccacaagggaacagatcctggtaaagcatgctcaagaggaacttccaccaccacctccccaaaagaagaggcagattactgtggattctgaaattaggaaaaggttggatgttgatataactgaacttcacagctggattactcgctcagaagctgtgttgcagagtcctgaatttgcaatctttcggaaggaaggcaacttctcagacttaaaagaaaaagtcaatgccatagagcgagaaaaagctgagaagttcagaaaactgcaagatgccagcagatcagctcaggccctggtggaacagatggtgaatgagggtgttaatgcagatagcatcaaacaagcctcagaacaactgaacagccggtggatcgaattctgccagttgctaagtgagagacttaactggctggagtatcagaacaacatcatcgctttctataatcagctacaacaattggagcagatgacaactactgctgaaaactggttgaaaatccaacccaccaccccatcagagccaacagcaattaaaagtcagttaaaaatttgtaaggatgaagtcaaccggctatcagatcttcaacctcaaattgaacgattaaaaattcaaagcatagccctgaaagagaaaggacaaggacccatgttcctggatgcagactttgtggcctttacaaatcattttaagcaagtcttttctgatgtgcaggccagagagaaagagctacagacaatttttgacactttgccaccaatgcgctatcaggagaccatgagtgccatcaggacatgggtccagcagtcagaaaccaaactctccatacctcaacttagtgtcaccgactatgaaatcatggagcagagactcggggaattgcaggctttacaaagttctctgcaagagcaacaaagtggcctatactatctcagcaccactgtgaaagagatgtcgaagaaagcgccctctgaaattagccggaaatatcaatcagaatttgaagaaattgagggacgctggaagaagctctcctcccagctggttgagcattgtcaaaagctagaggagcaaatgaataaactccgaaaaattcagaatcacatacaaaccctgaagaaatggatggctgaagttgatgtttttctgaaggaggaatggcctgcccttggggattcagaaattctaaaaaagcagctgaaacagtgcagacttttagtcagtgatattcagacaattcagcccagtctaaacagtgtcaatgaaggtgggcagaagataaagaatgaagcagagccagagtttgcttcgagacttgagacagaactcaaagaacttaacactcagtgggatcacatgtgccaacaggtctatgccagaaaggaggccttgaagggaggtttggagaaaactgtaagcctccagaaagatctatcagagatgcacgaatggatgacacaagctgaagaagagtatcttgagagagattttgaatataaaactccagatgaattacagaaagcagttgaagagatgaagagagctaaagaagaggcccaacaaaaagaagcgaaagtgaaactccttactgagtctgtaaatagtgtcatagctcaagctccacctgtagcacaagaggccttaaaaaaggaacttgaaactctaaccaccaactaccagtggctctgcactaggctgaatgggaaatgcaagactttggaagaagtttgggcatgttggcatgagttattgtcatacttggagaaagcaaacaagtggctaaatgaagtagaatttaaacttaaaaccactgaaaacattcctggcggagctgaggaaatctctgaggtgctagattcacttgaaaatttgatgcgacattcagaggataacccaaatcagattcgcatattggcacagaccctaacagatggcggagtcatggatgagctaatcaatgaggaacttgagacatttaattctcgttggagggaactacatgaagaggctgtaaggaggcaaaagttgcttgaacagagcatccagtctgcccaggagactgaaaaatccttacacttaatccaggagtccctcacattcattgacaagcagttggcagcttatattgcagacaaggtggacgcagctcaaatgcctcaggaagcccagaaaatccaatctgatttgacaagtcatgagatcagtttagaagaaatgaagaaacataatcaggggaaggaggctgcccaaagagtcctgtctcagattgatgttgcacagaaaaaattacaagatgtctccatgaagtttcgattattccagaaaccagccaattttgagcagcgtctacaagaaagtaagatgattttagatgaagtgaagatgcacttgcctgcattggaaacaaagagtgtggaacaggaagtagtacagtcacagctaaatcattgtgtgaacttgtataaaagtctgagtgaagtgaagtctgaagtggaaatggtgataaagactggacgtcagattgtacagaaaaagcagacggaaaatcccaaagaacttgatgaaagagtaacagctttgaaattgcattataatgagctgggagcaaaggtaacagaaagaaagcaacagttggagaaatgcttgaaattgtcccgtaagatgcgaaaggaaatgaatgtcttgacagaatggctggcagctacagatatggaattgacaaagagatcagcagttgaaggaatgcctagtaatttggattctgaagttgcctggggaaaggctactcaaaaagagattgagaaacagaaggtgcacctgaagagtatcacagaggtaggagaggccttgaaaacagttttgggcaagaaggagacgttggtggaagataaactcagtcttctgaatagtaactggatagctgtcacctcccgagcagaagagtggttaaatcttttgttggaataccagaaacacatggaaacttttgaccagaatgtggaccacatcacaaagtggatcattcaggctgacacacttttggatgaatcagagaaaaagaaaccccagcaaaaagaagacgtgcttaagcgtttaaaggcagaactgaatgacatacgcccaaaggtggactctacacgtgaccaagcagcaaacttgatggcaaaccgcggtgaccactgcaggaaattagtagagccccaaatctcagagctcaaccatcgatttgcagccatttcacacagaattaagactggaaaggcctccattcctttgaaggaattggagcagtttaactcagatatacaaaaattgcttgaaccactggaggctgaaattcagcagggggtgaatctgaaagaggaagacttcaataaagatatgaatgaagacaatgagggtactgtaaaagaattgttgcaaagaggagacaacttacaacaaagaatcacagatgagagaaagcgagaggaaataaagataaaacagcagctgttacagacaaaacataatgctctcaaggatttgaggtctcaaagaagaaaaaaggctctagaaatttctcatcagtggtatcagtacaagaggcaggctgatgatctcctgaaatgcttggatgacattgaaaaaaaattagccagcctacctgagcccagagatgaaaggaaaataaagatgaactaatgacttatcggtatatggacgacttcttactcatgttagcccattcatttcatcagagcatcttcacacatcagtgttcactctctatagatttatttgcatattgtctaaatatgtttttttctgttattattttacactttttattttgcttcattctctgttgagttcctcaaacctttaaaaaggaaataaataacttattcactta

SEQ ID NO: 868 - protein, 1915 aa, Homo sapiens
MLWWEEVEDCYEREDVQKKTFTKWVNAQFSKFGKQHIENLFSDLQDGRRLLDLLEGLTGQKLPKEKGSTRVHALNNVNKALRVLQNNNVDLVNIGSTDIVDGNHKLTLGLIWNIILHWQVKNVMKNIMAGLQQTNSEKILLSWVRQSTRNYPQVNVINFTTSWSDGLALNALIHSHRPDLFDWNSVVCQQSATQRLEHAFNIARYQLGIEKLLDPEDVDTTYPDKKSILMYITSLFQVLPQQVSIEAIQEVEMLPRPPKVTKEEHFQLHHQMHYSQQITVSLAQGYERTSSPKPRFKSYAYTQAAYVTTSDPTRSPFPSQHLEAPEDKSFGSSLMESEVNLDRYQTALEEVLSWLLSAEDTLQAQGEISNDVEVVKDQFHTHEGYMMDLTAHQGRVGNILQLGSKLIGTGKLSEDEETEVQEQMNLLNSRWECLRVASMEKQSNLHRVLMDLQNQKLKELNDWLTKTEERTRKMEEEPLGPDLEDLKRQVQQHKVLQEDLEQEQVRVNSLTHMVVVVDESSGDHATAALEEQLKVLGDRWANICRWTEDRWVLLQDILLKWQRLTEEQCLFSAWLSEKEDAVNKIHTTGFKDQNEMLSSLQKLAVLKADLEKKKQSMGKLYSLKQDLLSTLKNKSVTQKTEAWLDNFARCWDNLVQKLEKSTAQISQAVTTTQPSLTQTTVMETVTTVTTREQILVKHAQEELPPPPPQKKRQITVDSEIRKRLDVDITELHSWITRSEAVLQSPEFAIFRKEGNFSDLKEKVNAIEREKAEKFRKLQDASRSAQALVEQMVNEGVNADSIKQASEQLNSRWIEFCQLLSERLNWLEYQNNIIAFYNQLQQLEQMTTTAENWLKIQPTTPSEPTAIKSQLKICKDEVNRLSDLQPQIERLKIQSIALKEKGQGPMFLDADFVAFTNHFKQVFSDVQAREKELQTIFDTLPPMRYQETMSAIRTWVQQSETKLSIPQLSVTDYEIMEQRLGELQALQSSLQEQQSGLYYLSTTVKEMSKKAPSEISRKYQSEFEEIEGRWKKLSSQLVEHCQKLEEQMNKLRKIQNHIQTLKKWMAEVDVFLKEEWPALGDSEILKKQLKQCRLLVSDIQTIQPSLNSVNEGGQKIKNEAEPEFASRLETELKELNTQWDHMCQQVYARKEALKGGLEKTVSLQKDLSEMHEWMTQAEEEYLERDFEYKTPDELQKAVEEMKRAKEEAQQKEAKVKLLTESVNSVIAQAPPVAQEALKKELETLTTNYQWLCTRLNGKCKTLEEVWACWHELLSYLEKANKWLNEVEFKLKTTENIPGGAEEISEVLDSLENLMRHSEDNPNQIRILAQTLTDGGVMDELINEELETFNSRWRELHEEAVRRQKLLEQSIQSAQETEKSLHLIQESLTFIDKQLAAYIADKVDAAQMPQEAQKIQSDLTSHEISLEEMKKHNQGKEAAQRVLSQIDVAQKKLQDVSMKFRLFQKPANFEQRLQESKMILDEVKMHLPALETKSVEQEVVQSQLNHCVNLYKSLSEVKSEVEMVIKTGRQIVQKKQTENPKELDERVTALKLHYNELGAKVTERKQQLEKCLKLSRKMRKEMNVLTEWLAATDMELTKRSAVEGMPSNLDSEVAWGKATQKEIEKQKVHLKSITEVGEALKTVLGKKETLVEDKLSLLNSNWIAVTSRAEEWLNLLLEYQKHMETFDQNVDHITKWIIQADTLLDESEKKKPQQKEDVLKRLKAELNDIRPKVDSTRDQAANLMANRGDHCRKLVEPQISELNHRFAAISHRIKTGKASIPLKELEQFNSDIQKLLEPLEAEIQQGVNLKEEDFNKDMNEDNEGTVKELLQRGDNLQQRITDERKREEIKIKQQLLQTKHNALKDLRSQRRKKALEISHQWYQYKRQADDLLKCLDDIEKKLASLPEPRDERKIKMN

SEQ ID NO: 869 - protein, 2158 aa, Mus musculus
MWWVDCYRDVKKTTKWNASKGKHDNSDDGKRDGTGKKKGSTRVHANNVNKARVKNNVDVNGSTDVDGNHKTGWNHWVKNVMKTMAGTNSKSWVRSTRNYVNVNTSSWSDGANAHSHRDDWNSVVSHSATRHANAKCGKDDVATTYDKKSMYTSVVSAVMRTSSKVTRHHHMHYSTVSAGYTSSSKRKSYATAAYVATSDSTSYSHARDKSDSSMTVNDSYTAVSWSADTRAGSNDVVKHAHGMMDTSHGVGNVGSVGKGKSDAVMNNSRWCRVASMKSKHKVMDNKKDDWTKTRTKKMGDDKCVHKVDVRVNSTHMVVVVDSSGDHATAAKVGDRWANCRWTDRWVDKWHTCSTWSKDAMKNTSGKDNMMSSHKSTKDKKKTMKSSNDSAKNKSVTKMWMNARWDNTKKSSASAVTTTSTTTVMTVTMVTTRMVKHAKKRTVDSRKRDVDTHSWTRSAVSSAVYRKGNSDKVNAARKAKRKDASRSAAVMANGVNASRASNSRWTCSRVNWYTNTYNMTTTANKTSTTSTAKSKCKDVNRSAKSKKGGMDADVATNHNHDGVRAKKTDTMRYTMSSRTWSSKSVYSVTYMRGKASSKNGNYSDTVKMAKKASCKYSGHWKKSSVSCKHMNKRKNHKTKWMAVDVKWAGDAKKKCRVGDTSNSVNGGKKSAASRTRNTWDHCRVYTRKAKAGDKTVSKDSMHWMTAYRDYKTDTAVMKRAKAKTKVKTTVNSVAHASAAKKTTTNYWCTRNGKCKTVWACWHSYKANKWNVKKTMNVAGTVSNMHHSNNRATTDGGVMDNTNSRWRHAVRKKSSAKSHSDKAAYTDKVDAAMAKSDTSHSMKKHNGKDANRVSDVAKKDVSMKRKANRSKMDVKMHATKSVVSSHCVNYKSSVKSVMVKTGRVKKTNKDRVTAKHYNGAKVTRKKCKSRKMRKMNVTWAATDTTKRSAVGMSNDSVAWGKATKKKAHKSVTGSKMVGKKTVDKSNSNWAVTSRVWNYKHMTDNTKWHADDSKKKKDKRKAMNDMRKVDSTRDAAKMANRGDHCRKVVSNRRAASHRKTGKASKNSDKAGVNKDNKDMSDNGTVNRGDNRTDRKRKKTKHNAKDRSRRKKASHWYYKRADDKCDKKASRDRKKDRKKKNAVRRAGSNGAAMAVTSKRWRSNARRNAHTHTMVVTTDMDVSYVSTYTSHASVDHNTCAKDDKSKNKDNSGRDHKKKTAASATSMKVKVAVAMDGKHRMYKRGRDRSVKWRHHYDMKVNWNVKKTNNWHAKYKWYKDGGRAVVRTNATGSSKTDVNKGSSRWHDCKARRKRKNVSRDNVWADNATGDKVKARGKNTGGAVVSARDKKKKTNWKVSRAKGVHKDRDHWSRNYNSAGDKVTVHGKADVRSKGHYKKSTVKRKDRSWAVNHRRTKDRAGSTTGASASTVTVTSVVTKTVSKMSSVAADNRAWTTDWSDRVKSRVMVGDDNMKKATDRRTAANKNKTSNARTTDRRWDVNRRNMKDSTWAKAVGVRGKDSWKGHTVDAKKTTKAKDRRSVDVANDAKRDYSADDTRKVHMTNNTSWGNHKRVSAATHRDKSWTATTANVDASRKKDSRGVRMKWDGTHTDYHNDNGKRSGSDARRDNMNKWSKKSNRSHASSDWKRHSVWKDDSRAGGDAVKNDHRAKRKTKVMSTTVRTGKYRRANVTRRKAVNAWDKNRSADWRKDARAADDKRAVKGSWVGDDSDHKVKARGAKNVNRVNDAHTTGSYNSTDNTRWRVAVDRVRHAHRDGASHSTSVGWRASNKVYYNHTTTCWDHKMTYSADNNVRSAYRTAMKRRKACDSSAACDADHNKNDMDNCTTYDRHNNVNVCVDMCNWNVYDTGRTGRRVSKTGSCKAHDKYRYKVASSTGCDRRGHDSRGVASGGSNSVRSCANNKAADWMRSMVWVHRVAAATAKHAKCNCKCGRYRSKHNYDCSCSGRVAKGHKMHYMVYCTTTSGDVRDAKVKNKRTKRYAKHRMGYVTVGDNMTVTNWVDSAASSSHDDTHSRHYASRAMNSNGSYNDSSNSDDHHYCSNDSSRSASSRGRADNRNAYDRKHHKGSSMMTSSRDAAAKRHKGRARMDHNKSHRRAAKVNGTTVSSSTSRSDSSMRVVGSTSSMGDSDTSTGVMNNSSSRGRNAGKMRDTM

SEQ ID NO: 870 - protein, 1307 aa, Acidaminococcus sp.
MTQFEGFTNLYQVSKTLRFELIPQGKTLKHIQEQGFIEEDKARNDHYKELKPIIDRIYKTYADQCLQLVQLDWENLSAAIDSYRKEKTEETRNALIEEQATYRNAIHDYFIGRTDNLTDAINKRHAEIYKGLFKAELFNGKVLKQLGTVTTTEHENALLRSFDKFTTYFSGFYENRKNVFSAEDISTAIPHRIVQDNFPKFKENCHIFTRLITAVPSLREHFENVKKAIGIFVSTSIEEVFSFPFYNQLLTQTQIDLYNQLLGGISREAGTEKIKGLNEVLNLAIQKNDETAHIIASLPHRFIPLFKQILSDRNTLSFILEEFKSDEEVIQSFCKYKTLLRNENVLETAEALFNELNSIDLTHIFISHKKLETISSALCDHWDTLRNALYERRISELTGKITKSAKEKVQRSLKHEDINLQEIISAAGKELSEAFKQKTSEILSHAHAALDQPLPTTLKKQEEKEILKSQLDSLLGLYHLLDWFAVDESNEVDPEFSARLTGIKLEMEPSLSFYNKARNYATKKPYSVEKFKLNFQMPTLASGWDVNKEKNNGAILFVKNGLYYLGIMPKQKGRYKALSFEPTEKTSEGFDKMYYDYFPDAAKMIPKCSTQLKAVTAHFQTHTTPILLSNNFIEPLEITKEIYDLNNPEKEPKKFQTAYAKKTGDQKGYREALCKWIDFTRDFLSKYTKTTSIDLSSLRPSSQYKDLGEYYAELNPLLYHISFQRIAEKEIMDAVETGKLYLFQIYNKDFAKGHHGKPNLHTLYWTGLFSPENLAKTSIKLNGQAELFYRPKSRMKRMAHRLGEKMLNKKLKDQKTPIPDTLYQELYDYVNHRLSHDLSDEARALLPNVITKEVSHEIIKDRRFTSDKFFFHVPITLNYQAANSPSKFNQRVNAYLKEHPETPIIGIDRGERNLIYITVIDSTGKILEQRSLNTIQQFDYQKKLDNREKERVAARQAWSVVGTIKDLKQGYLSQVIHEIVDLMIHYQAVVVLENLNFGFKSKRTGIAEKAVYQQFEKMLIDKLNCLVLKDYPAEKVGGVLNPYQLTDQFTSFAKMGTQSGFLFYVPAPYTSKIDPLTGFVDPFVWKTIKNHESRKHFLEGFDFLHYDVKTGDFILHFKMNRNLSFQRGLPGFMPAWDIVFEKNETQFDAKGTPFIAGKRIVPVIENHRFTGRYRDLYPANELIALLEEKGIVFRDGSNILPKLLENDDSHAIDTMVALIRSVLQMRNSNAATGEDYINSPVRDLNGVCFDSRFQNPEWPMDADANGAYHIALKGQLLLNHLKESKDLKLQNGISNQDWLAYIQELRN

SEQ ID NO: 871 - protein, 1228 aa, Unknown
  source: /note="Description of Unknown: Lachnospiraceae bacterium ND2006"
AASKLEKFTNCYSLSKTLRFKAIPVGKTQENIDNKRLLVEDEKRAEDYKGVKKLLDRYYLSFINDVLHSIKLKNLNNYISLFRKKTRTEKENKELENLEINLRKEIAKAFKGAAGYKSLFKKDIIETILPEAADDKDEIALVNSFNGFTTAFTGFFDNRENMFSEEAKSTSIAFRCINENLTRYISNMDIFEKVDAIFDKHEVQEIKEKILNSDYDVEDFFEGEFFNFVLTQEGIDVYNAIIGGFVTESGEKIKGLNEYINLYNAKTKQALPKFKPLYKQVLSDRESLSFYGEGYTSDEEVLEVFRNTLNKNSEIFSSIKKLEKLFKNFDEYSSAGIFVKNGPAISTISKDIFGEWNLIRDKWNAEYDDIHLKKKAVVTEKYEDDRRKSFKKIGSFSLEQLQEYADADLSVVEKLKEIIIQKVDEIYKVYGSSEKLFDADFVLEKSLKKNDAVVAIMKDLLDSVKSFENYIKAFFGEGKETNRDESFYGDFVLAYDILLKVDHIYDAIRNYVTQKPYSKDKFKLYFQNPQFMGGWDKDKETDYRATILRYGSKYYLAIMDKKYAKCLQKIDKDDVNGNYEKINYKLLPGPNKMLPKVFFSKKWMAYYNPSEDIQKIYKNGTFKKGDMFNLNDCHKLIDFFKDSISRYPKWSNAYDFNFSETEKYKDIAGFYREVEEQGYKVSFESASKKEVDKLVEEGKLYMFQIYNKDFSDKSHGTPNLHTMYFKLLFDENNHGQIRLSGGAELFMRRASLKKEELVVHPANSPIANKNPDNPKKTTTLSYDVYKDKRFSEDQYELHIPIAINKCPKNIFKINTEVRVLLKHDDNPYVIGIDRGERNLLYIVVVDGKGNIVEQYSLNEIINNFNGIRIKTDYHSLLDKKEKERFEARQNWTSIENIKELKAGYISQVVHKICELVEKYDAVIALEDLNSGFKNSRVKVEKQVYQKFEKMLIDKLNYMVDKKSNPCATGGALKGYQITNKFESFKSMSTQNGFIFYIPAWLTSKIDPSTGFVNLLKTKYTSIADSKKFISSFDRIMYVPEEDLFEFALDYKNFSRTDADYIKKWKLYSYGNRIRIFAAAKKNNVFAWEEVCLTSAYKELFNKYGINYQQGDIRALLCEQSDKAFYSSFMALMSLMLQMRNSITGRTDVDFLISPVKNSDGIFYDSRNYEAQENAILPKNADANGAYNIARKVLWAIGQFKKAEDEKLDKVKIAISNKEWLEYAQTSVK

SEQ ID NO: 872 - DNA, 4101 bp, Staphylococcus pyogenes
gacaagaagtacagcatcggcctggacatcggcaccaactctgtgggctgggccgtgatcaccgacgagtacaaggtgcccagcaagaaattcaaggtgctgggcaacaccgaccggcacagcatcaagaagaacctgatcggagccctgctgttcgacagcggcgaaacagccgaggccacccggctgaagagaaccgccagaagaagatacaccagacggaagaaccggatctgctatctgcaagagatcttcagcaacgagatggccaaggtggacgacagcttcttccacagactggaagagtccttcctggtggaagaggataagaagcacgagcggcaccccatcttcggcaacatcgtggacgaggtggcctaccacgagaagtaccccaccatctaccacctgagaaagaaactggtggacagcaccgacaaggccgacctgcggctgatctatctggccctggcccacatgatcaagttccggggccacttcctgatcgagggcgacctgaaccccgacaacagcgacgtggacaagctgttcatccagctggtgcagacctacaaccagctgttcgaggaaaaccccatcaacgccagcggcgtggacgccaaggccatcctgtctgccagactgagcaagagcagacggctggaaaatctgatcgcccagctgcccggcgagaagaagaatggcctgttcggcaacctgattgccctgagcctgggcctgacccccaacttcaagagcaacttcgacctggccgaggatgccaaactgcagctgagcaaggacacctacgacgacgacctggacaacctgctggcccagatcggcgaccagtacgccgacctgtttctggccgccaagaacctgtccgacgccatcctgctgagcgacatcctgagagtgaacaccgagatcaccaaggcccccctgagcgcctctatgatcaagagatacgacgagcaccaccaggacctgaccctgctgaaagctctcgtgcggcagcagctgcctgagaagtacaaagagattttcttcgaccagagcaagaacggctacgccggctacattgacggcggagccagccaggaagagttctacaagttcatcaagcccatcctggaaaagatggacggcaccgaggaactgctcgtgaagctgaacagagaggacctgctgcggaagcagcggaccttcgacaacggcagcatcccccaccagatccacctgggagagctgcacgccattctgcggcggcaggaagatttttacccattcctgaaggacaaccgggaaaagatcgagaagatcctgaccttccgcatcccctactacgtgggccctctggccaggggaaacagcagattcgcctggatgaccagaaagagcgaggaaaccatcaccccctggaacttcgaggaagtggtggacaagggcgcttccgcccagagcttcatcgagcggatgaccaacttcgataagaacctgcccaacgagaaggtgctgcccaagcacagcctgctgtacgagtacttcaccgtgtataacgagctgaccaaagtgaaatacgtgaccgagggaatgagaaagcccgccttcctgagcggcgagcagaaaaaggccatcgtggacctgctgttcaagaccaaccggaaagtgaccgtgaagcagctgaaagaggactacttcaagaaaatcgagtgcttcgactccgtggaaatctccggcgtggaagatcggttcaacgcctccctgggcacataccacgatctgctgaaaattatcaaggacaaggacttcctggacaatgaggaaaacgaggacattctggaagatatcgtgctgaccctgacactgtttgaggacagagagatgatcgaggaacggctgaaaacctatgcccacctgttcgacgacaaagtgatgaagcagctgaagcggcggagatacaccggctggggcaggctgagccggaagctgatcaacggcatccgggacaagcagtccggcaagacaatcctggatttcctgaagtccgacggcttcgccaacagaaacttcatgcagctgatccacgacgacagcctgacctttaaagaggacatccagaaagcccaggtgtccggccagggcgatagcctgcacgagcacattgccaatctggccggcagccccgccattaagaagggcatcctgcagacagtgaaggtggtggacgagctcgtgaaagtgatgggccggcacaagcccgagaacatcgtgatcgaaatggccagagagaaccagaccacccagaagggacagaagaacagccgcgagagaatgaagcggatcgaagagggcatcaaagagctgggcagccagatcctgaaagaacaccccgtggaaaacacccagctgcagaacgagaagctgtacctgtactacctgcagaatgggcgggatatgtacgtggaccaggaactggacatcaaccggctgtccgactacgatgtggaccatatcgtgcctcagagctttctgaaggacgactccatcgacaacaaggtgctgaccagaagcgacaagaaccggggcaagagcgacaacgtgccctccgaagaggtcgtgaagaagatgaagaactactggcggcagctgctgaacgccaagctgattacccagagaaagttcgacaatctgaccaaggccgagagaggcggcctgagcgaactggataaggccggcttcatcaagagacagctggtggaaacccggcagatcacaaagcacgtggcacagatcctggactcccggatgaacactaagtacgacgagaatgacaagctgatccgggaagtgaaagtgatcaccctgaagtccaagctggtgtccgatttccggaaggatttccagttttacaaagtgcgcgagatcaacaactaccaccacgcccacgacgcctacctgaacgccgtcgtgggaaccgccctgatcaaaaagtaccctaagctggaaagcgagttcgtgtacggcgactacaaggtgtacgacgtgcggaagatgatcgccaagagcgagcaggaaatcggcaaggctaccgccaagtacttcttctacagcaacatcatgaactttttcaagaccgagattaccctggccaacggcgagatccggaagcggcctctgatcgagacaaacggcgaaaccggggagatcgtgtgggataagggccgggattttgccaccgtgcggaaagtgctgagcatgccccaagtgaatatcgtgaaaaagaccgaggtgcagacaggcggcttcagcaaagagtctatcctgcccaagaggaacagcgataagctgatcgccagaaagaaggactgggaccctaagaagtacggcggcttcgacagccccaccgtggcctattctgtgctggtggtggccaaagtggaaaagggcaagtccaagaaactgaagagtgtgaaagagctgctggggatcaccatcatggaaagaagcagcttcgagaagaatcccatcgactttctggaagccaagggctacaaagaagtgaaaaaggacctgatcatcaagctgcctaagtactccctgttcgagctggaaaacggccggaagagaatgctggcctctgccggcgaactgcagaagggaaacgaactggccctgccctccaaatatgtgaacttcctgtacctggccagccactatgagaagctgaagggctcccccgaggataatgagcagaaacagctgtttgtggaacagcacaagcactacctggacgagatcatcgagcagatcagcgagttctccaagagagtgatcctggccgacgctaatctggacaaagtgctgtccgcctacaacaagcaccgggataagcccatcagagagcaggccgagaatatcatccacctgtttaccctgaccaatctgggagcccctgccgccttcaagtactttgacaccaccatcgaccggaagaggtacaccagcaccaaagaggtgctggacgccaccctgatccaccagagcatcaccggcctgtacgagacacggatcgacctgtctcagctgggaggcgac

SEQ ID NO: 873 - protein, 1053 aa, Staphylococcus aureus
MKRNYILGLDIGITSVGYGIIDYETRDVIDAGVRLFKEANVENNEGRRSKRGARRLKRRRRHRIQRVKKLLFDYNLLTDHSELSGINPYEARVKGLSQKLSEEEFSAALLHLAKRRGVHNVNEVEEDTGNELSTKEQISRNSKALEEKYVAELQLERLKKDGEVRGSINRFKTSDYVKEAKQLLKVQKAYHQLDQSFIDTYIDLLETRRTYYEGPGEGSPFGWKDIKEWYEMLMGHCTYFPEELRSVKYAYNADLYNALNDLNNLVITRDENEKLEYYEKFQIIENVFKQKKKPTLKQIAKEILVNEEDIKGYRVTSTGKPEFTNLKVYHDIKDITARKEIIENAELLDQIAKILTIYQSSEDIQEELTNLNSELTQEEIEQISNLKGYTGTHNLSLKAINLILDELWHTNDNQIAIFNRLKLVPKKVDLSQQKEIPTTLVDDFILSPVVKRSFIQSIKVINAIIKKYGLPNDIIIELAREKNSKDAQKMINEMQKRNRQTNERIEEIIRTTGKENAKYLIEKIKLHDMQEGKCLYSLEAIPLEDLLNNPFNYEVDHIIPRSVSFDNSFNNKVLVKQEENSKKGNRTPFQYLSSSDSKISYETFKKHILNLAKGKGRISKTKKEYLLEERDINRFSVQKDFINRNLVDTRYATRGLMNLLRSYFRVNNLDVKVKSINGGFTSFLRRKWKFKKERNKGYKHHAEDALIIANADFIFKEWKKLDKAKKVMENQMFEEKQAESMPEIETEQEYKEIFITPHQIKHIKDFKDYKYSHRVDKKPNRELINDTLYSTRKDDKGNTLIVNNLNGLYDKDNDKLKKLINKSPEKLLMYHHDPQTYQKLKLIMEQYGDEKNPLYKYYEETGNYLTKYSKKDNGPVIKKIKYYGNKLNAHLDITDDYPNSRNKVVKLSLKPYRFDVYLDNGVYKFVTVKNLDVIKKENYYEVNSKCYEEAKKLKKISNQAEFIASFYNNDLIKINGELYRVIGVNNDLLNRIEVNMIDITYREYLENMNDKRPPRIIKTIASKTQSIKKYSTDILGNLYEVKSKKHPQIIKKG

SEQ ID NO: 874 - DNA, 450 bp, Unknown
  source: /note="Description of Unknown: CK8 promoter polynucleotide"
ctagactagcatgctgcccatgtaaggaggcaaggcctggggacacccgagatgcctggttataattaacccagacatgtggctgcccccccccccccaacacctgctgcctctaaaaataaccctgcatgccatgttcccggcgaagggccagctgtcccccgccagctagactcagcacttagtttaggaaccagtgagcaagtcagcccttggggcagcccatacaaggccatggggctgggcaagctgcacgcctgggtccggggtgggcacggtgcccgggcaacgagctgaaagctcatctgctctcaggggcccctccctggggacagcccctcctggctagtcacaccctgtaggctcctctatataacccaggggcacaggggctgccctcattctaccaccacctccacagcacagacagacactcaggagccagccagc

SEQ ID NO: 875 - DNA, 436 bp, Unknown
  source: /note="Description of Unknown: CK8e promoter polynucleotide"
tgcccatgtaaggaggcaaggcctggggacacccgagatgcctggttataattaacccagacatgtggctgcccccccccccccaacacctgctgcctctaaaaataaccctgcatgccatgttcccggcgaagggccagctgtcccccgccagctagactcagcacttagtttaggaaccagtgagcaagtcagcccttggggcagcccatacaaggccatggggctgggcaagctgcacgcctgggtccggggtgggcacggtgcccgggcaacgagctgaaagctcatctgctctcaggggcccctccctggggacagcccctcctggctagtcacaccctgtaggctcctctatataacccaggggcacaggggctgccctcattctaccaccacctccacagcacagacagacactcaggagccagccagc

SEQ ID NO: 876 - protein, 18 aa, Thosea asigna
EGRGSLLTCGDVEENPGP

SEQ ID NO: 877 - protein, 20 aa, Equine rhinitis A virus
QCTNYALLKLAGDVESNPGP

SEQ ID NO: 878 - protein, 19 aa, Porcine teschovirus-1
ATNFSLLKQAGDVEENPGP

SEQ ID NO: 879 - protein, 23 aa, Foot and mouth disease virus
PVKQLLNFDLLKLAGDVESNPGP

SEQ ID NO: 880 - DNA, 115 bp, Adeno associated virus
ggccactccctctctgcgcgctcgctcgctcactgaggccgggcgaccaaaggtcgcccgacgcccgggctttgcccgggcggcctcagtgagcgagcgagcgcgcagagaggga

SEQ ID NO: 881 - DNA, 141 bp, Adeno associated virus
cctgcaggcagctgcgcgctcgctcgctcactgaggccgcccgggcaaagcccgggcgtcgggcgacctttggtcgcccggcctcagtgagcgagcgagcgcgcagagagggagtggccaactccatcactaggggttcct

SEQ ID NO: 882 - DNA, 141 bp, Adeno associated virus
aggaacccctagtgatggagttggccactccctctctgcgcgctcgctcgctcactgaggccgggcgaccaaaggtcgcccgacgcccgggctttgcccgggcggcctcagtgagcgagcgagcgcgcagctgcctgcagg

SEQ ID NO: 883 - DNA, 141 bp, Adeno associated virus
ccactccctctatgcgcgctcgctcactcactcggccctggagaccaaaggtctccagactgccggcctctggccggcagggccgagtgagtgagcgagcgcgcatagagggagtgggtacctccatcatctaggtttgcc

SEQ ID NO: 884 - protein, 9 aa, Unknown
  source: /note="Description of Unknown: C-myc NLS sequence"
PAAKRVKLD

SEQ ID NO: 885 - DNA, 51 bp, Simian virus 40
atggccccaaagaagaagcggaaggtcggtatccacggagtcccagcagcc

SEQ ID NO: 886 - protein, 42 aa, Homo sapiens
GNYNNQSSNFGPMKGGNFGGRSSGPYGGGGQYFAKPRNQGGY

SEQ ID NO: 887 - DNA, 48 bp, Unknown
  source: /note="Description of Unknown: Nucleoplasmin NLS sequence"
aagcgtcctgctgctactaagaaagctggtcaagctaagaaaaagaaa

SEQ ID NO: 888 - protein, 41 aa, Unknown
  source: /note="Description of Unknown: IBB domain from importin alphasequence"
RMRKFKNKGKDTAELRRRRVEVSVELRKAKKDEQILKRRNV

SEQ ID NO: 889 - protein, 8 aa, Unknown
  source: /note="Description of Unknown: Myoma T protein sequence"
VSRKRPRP

SEQ ID NO: 890 - protein, 8 aa, Unknown
  source: /note="Description of Unknown: Myoma T protein sequence"
PPKKARED

SEQ ID NO: 891 - protein, 8 aa, Homo sapiens
PQPKKKPL

SEQ ID NO: 892 - protein, 12 aa, Mus musculus
SALIKKKKKMAP

SEQ ID NO: 893 - protein, 5 aa, Influenza virus
DRLRR

SEQ ID NO: 894 - protein, 7 aa, Influenza virus
PKQKKRK

SEQ ID NO: 895 - protein, 10 aa, Hepatitis delta virus
RKLKKKIKKL

SEQ ID NO: 896 - protein, 10 aa, Mus musculus
REKKKFLKRR

SEQ ID NO: 897 - protein, 20 aa, Homo sapiens
KRKGDEVDGVDEVAKKKSKK

SEQ ID NO: 898 - protein, 17 aa, Homo sapiens
RKCLQAGMNLEARKTKK

SEQ ID NO: 899 - DNA, 5133 bp, Artificial Sequence
  source: /note="Description of Artificial Sequence: Synthetic polynucleotide"
ggccactccctctctgcgcgctcgctcgctcactgaggccgggcgaccaaaggtcgcccgacgcccgggctttgcccgggcggcctcagtgagcgagcgagcgcgcagagagggagtggccaactccatcactaggggttccttgtagttaatgattaacccgccatgctacttatctacgtagccatgctctagattaattaatgcccatgtaaggaggcaaggcctggggacacccgagatgcctggttataattaacccagacatgtggctgcccccccccccccaacacctgctgcctctaaaaataaccctgcatgccatgttcccggcgaagggccagctgtcccccgccagctagactcagcacttagtttaggaaccagtgagcaagtcagcccttggggcagcccatacaaggccatggggctgggcaagctgcacgcctgggtccggggtgggcacggtgcccgggcaacgagctgaaagctcatctgctctcaggggcccctccctggggacagcccctcctggctagtcacaccctgtaggctcctctatataacccaggggcacaggggctgccctcattctaccaccacctccacagcacagacagacactcaggagccagccagcgctagcgccaccatgatggccccaaagaagaagcggaaggtcggtatccacggagtcccagcagccgacaagaagtacagcatcggcctggacatcggcaccaactctgtgggctgggccgtgatcaccgacgagtacaaggtgcccagcaagaaattcaaggtgctgggcaacaccgaccggcacagcatcaagaagaacctgatcggagccctgctgttcgacagcggcgaaacagccgaggccacccggctgaagagaaccgccagaagaagatacaccagacggaagaaccggatctgctatctgcaagagatcttcagcaacgagatggccaaggtggacgacagcttcttccacagactggaagagtccttcctggtggaagaggataagaagcacgagcggcaccccatcttcggcaacatcgtggacgaggtggcctaccacgagaagtaccccaccatctaccacctgagaaagaaactggtggacagcaccgacaaggccgacctgcggctgatctatctggccctggcccacatgatcaagttccggggccacttcctgatcgagggcgacctgaaccccgacaacagcgacgtggacaagctgttcatccagctggtgcagacctacaaccagctgttcgaggaaaaccccatcaacgccagcggcgtggacgccaaggccatcctgtctgccagactgagcaagagcagacggctggaaaatctgatcgcccagctgcccggcgagaagaagaatggcctgttcggcaacctgattgccctgagcctgggcctgacccccaacttcaagagcaacttcgacctggccgaggatgccaaactgcagctgagcaaggacacctacgacgacgacctggacaacctgctggcccagatcggcgaccagtacgccgacctgtttctggccgccaagaacctgtccgacgccatcctgctgagcgacatcctgagagtgaacaccgagatcaccaaggcccccctgagcgcctctatgatcaagagatacgacgagcaccaccaggacctgaccctgctgaaagctctcgtgcggcagcagctgcctgagaagtacaaagagattttcttcgaccagagcaagaacggctacgccggctacattgacggcggagccagccaggaagagttctacaagttcatcaagcccatcctggaaaagatggacggcaccgaggaactgctcgtgaagctgaacagagaggacctgctgcggaagcagcggaccttcgacaacggcagcatcccccaccagatccacctgggagagctgcacgccattctgcggcggcaggaagatttttacccattcctgaaggacaaccgggaaaagatcgagaagatcctgaccttccgcatcccctactacgtgggccctctggccaggggaaacagcagattcgcctggatgaccagaaagagcgaggaaaccatcaccccctggaacttcgaggaagtggtggacaagggcgcttccgcccagagcttcatcgagcggatgaccaacttcgataagaacctgcccaacgagaaggtgctgcccaagcacagcctgctgtacgagtacttcaccgtgtataacgagctgaccaaagtgaaatacgtgaccgagggaatgagaaagcccgccttcctgagcggcgagcagaaaaaggccatcgtggacctgctgttcaagaccaaccggaaagtgaccgtgaagcagctgaaagaggactacttcaagaaaatcgagtgcttcgactccgtggaaatctccggcgtggaagatcggttcaacgcctccctgggcacataccacgatctgctgaaaattatcaaggacaaggacttcctggacaatgaggaaaacgaggacattctggaagatatcgtgctgaccctgacactgtttgaggacagagagatgatcgaggaacggctgaaaacctatgcccacctgttcgacgacaaagtgatgaagcagctgaagcggcggagatacaccggctggggcaggctgagccggaagctgatcaacggcatccgggacaagcagtccggcaagacaatcctggatttcctgaagtccgacggcttcgccaacagaaacttcatgcagctgatccacgacgacagcctgacctttaaagaggacatccagaaagcccaggtgtccggccagggcgatagcctgcacgagcacattgccaatctggccggcagccccgccattaagaagggcatcctgcagacagtgaaggtggtggacgagctcgtgaaagtgatgggccggcacaagcccgagaacatcgtgatcgaaatggccagagagaaccagaccacccagaagggacagaagaacagccgcgagagaatgaagcggatcgaagagggcatcaaagagctgggcagccagatcctgaaagaacaccccgtggaaaacacccagctgcagaacgagaagctgtacctgtactacctgcagaatgggcgggatatgtacgtggaccaggaactggacatcaaccggctgtccgactacgatgtggaccatatcgtgcctcagagctttctgaaggacgactccatcgacaacaaggtgctgaccagaagcgacaagaaccggggcaagagcgacaacgtgccctccgaagaggtcgtgaagaagatgaagaactactggcggcagctgctgaacgccaagctgattacccagagaaagttcgacaatctgaccaaggccgagagaggcggcctgagcgaactggataaggccggcttcatcaagagacagctggtggaaacccggcagatcacaaagcacgtggcacagatcctggactcccggatgaacactaagtacgacgagaatgacaagctgatccgggaagtgaaagtgatcaccctgaagtccaagctggtgtccgatttccggaaggatttccagttttacaaagtgcgcgagatcaacaactaccaccacgcccacgacgcctacctgaacgccgtcgtgggaaccgccctgatcaaaaagtaccctaagctggaaagcgagttcgtgtacggcgactacaaggtgtacgacgtgcggaagatgatcgccaagagcgagcaggaaatcggcaaggctaccgccaagtacttcttctacagcaacatcatgaactttttcaagaccgagattaccctggccaacggcgagatccggaagcggcctctgatcgagacaaacggcgaaaccggggagatcgtgtgggataagggccgggattttgccaccgtgcggaaagtgctgagcatgccccaagtgaatatcgtgaaaaagaccgaggtgcagacaggcggcttcagcaaagagtctatcctgcccaagaggaacagcgataagctgatcgccagaaagaaggactgggaccctaagaagtacggcggcttcgacagccccaccgtggcctattctgtgctggtggtggccaaagtggaaaagggcaagtccaagaaactgaagagtgtgaaagagctgctggggatcaccatcatggaaagaagcagcttcgagaagaatcccatcgactttctggaagccaagggctacaaagaagtgaaaaaggacctgatcatcaagctgcctaagtactccctgttcgagctggaaaacggccggaagagaatgctggcctctgccggcgaactgcagaagggaaacgaactggccctgccctccaaatatgtgaacttcctgtacctggccagccactatgagaagctgaagggctcccccgaggataatgagcagaaacagctgtttgtggaacagcacaagcactacctggacgagatcatcgagcagatcagcgagttctccaagagagtgatcctggccgacgctaatctggacaaagtgctgtccgcctacaacaagcaccgggataagcccatcagagagcaggccgagaatatcatccacctgtttaccctgaccaatctgggagcccctgccgccttcaagtactttgacaccaccatcgaccggaagaggtacaccagcaccaaagaggtgctggacgccaccctgatccaccagagcatcaccggcctgtacgagacacggatcgacctgtctcagctgggaggcgacaagcgtcctgctgctactaagaaagctggtcaagctaagaaaaagaaatgaatcgattagcaataaaggatcgtttattttcattggaagcgtgtgttggttttttgatcaggcgcgggtaccaggtcgcggccgctctagagcatggctacgtagataagtagcatggcgggttaatcattaactacaaggaacccctagtgatggagttggccactccctctctgcgcgctcgctcgctcactgaggccgggcgaccaaaggtcgcccgacgcccgggctttgcccgggcggcctcagtgagcgagcgagcgcgcagagaggga

SEQ ID NO: 900 - DNA, 5185 bp, Artificial Sequence
  source: /note="Description of Artificial Sequence: Synthetic polynucleotide"
cctgcaggcagctgcgcgctcgctcgctcactgaggccgcccgggcaaagcccgggcgtcgggcgacctttggtcgcccggcctcagtgagcgagcgagcgcgcagagagggagtggccaactccatcactaggggttcctgtggccaactccatcactaggggttccttgtagttaatgattaacccgccatgctacttatctacgtagccatgctctagattaattaatgcccatgtaaggaggcaaggcctggggacacccgagatgcctggttataattaacccagacatgtggctgcccccccccccccaacacctgctgcctctaaaaataaccctgcatgccatgttcccggcgaagggccagctgtcccccgccagctagactcagcacttagtttaggaaccagtgagcaagtcagcccttggggcagcccatacaaggccatggggctgggcaagctgcacgcctgggtccggggtgggcacggtgcccgggcaacgagctgaaagctcatctgctctcaggggcccctccctggggacagcccctcctggctagtcacaccctgtaggctcctctatataacccaggggcacaggggctgccctcattctaccaccacctccacagcacagacagacactcaggagccagccagcgctagcgccaccatgatggccccaaagaagaagcggaaggtcggtatccacggagtcccagcagccgacaagaagtacagcatcggcctggacatcggcaccaactctgtgggctgggccgtgatcaccgacgagtacaaggtgcccagcaagaaattcaaggtgctgggcaacaccgaccggcacagcatcaagaagaacctgatcggagccctgctgttcgacagcggcgaaacagccgaggccacccggctgaagagaaccgccagaagaagatacaccagacggaagaaccggatctgctatctgcaagagatcttcagcaacgagatggccaaggtggacgacagcttcttccacagactggaagagtccttcctggtggaagaggataagaagcacgagcggcaccccatcttcggcaacatcgtggacgaggtggcctaccacgagaagtaccccaccatctaccacctgagaaagaaactggtggacagcaccgacaaggccgacctgcggctgatctatctggccctggcccacatgatcaagttccggggccacttcctgatcgagggcgacctgaaccccgacaacagcgacgtggacaagctgttcatccagctggtgcagacctacaaccagctgttcgaggaaaaccccatcaacgccagcggcgtggacgccaaggccatcctgtctgccagactgagcaagagcagacggctggaaaatctgatcgcccagctgcccggcgagaagaagaatggcctgttcggcaacctgattgccctgagcctgggcctgacccccaacttcaagagcaacttcgacctggccgaggatgccaaactgcagctgagcaaggacacctacgacgacgacctggacaacctgctggcccagatcggcgaccagtacgccgacctgtttctggccgccaagaacctgtccgacgccatcctgctgagcgacatcctgagagtgaacaccgagatcaccaaggcccccctgagcgcctctatgatcaagagatacgacgagcaccaccaggacctgaccctgctgaaagctctcgtgcggcagcagctgcctgagaagtacaaagagattttcttcgaccagagcaagaacggctacgccggctacattgacggcggagccagccaggaagagttctacaagttcatcaagcccatcctggaaaagatggacggcaccgaggaactgctcgtgaagctgaacagagaggacctgctgcggaagcagcggaccttcgacaacggcagcatcccccaccagatccacctgggagagctgcacgccattctgcggcggcaggaagatttttacccattcctgaaggacaaccgggaaaagatcgagaagatcctgaccttccgcatcccctactacgtgggccctctggccaggggaaacagcagattcgcctggatgaccagaaagagcgaggaaaccatcaccccctggaacttcgaggaagtggtggacaagggcgcttccgcccagagcttcatcgagcggatgaccaacttcgataagaacctgcccaacgagaaggtgctgcccaagcacagcctgctgtacgagtacttcaccgtgtataacgagctgaccaaagtgaaatacgtgaccgagggaatgagaaagcccgccttcctgagcggcgagcagaaaaaggccatcgtggacctgctgttcaagaccaaccggaaagtgaccgtgaagcagctgaaagaggactacttcaagaaaatcgagtgcttcgactccgtggaaatctccggcgtggaagatcggttcaacgcctccctgggcacataccacgatctgctgaaaattatcaaggacaaggacttcctggacaatgaggaaaacgaggacattctggaagatatcgtgctgaccctgacactgtttgaggacagagagatgatcgaggaacggctgaaaacctatgcccacctgttcgacgacaaagtgatgaagcagctgaagcggcggagatacaccggctggggcaggctgagccggaagctgatcaacggcatccgggacaagcagtccggcaagacaatcctggatttcctgaagtccgacggcttcgccaacagaaacttcatgcagctgatccacgacgacagcctgacctttaaagaggacatccagaaagcccaggtgtccggccagggcgatagcctgcacgagcacattgccaatctggccggcagccccgccattaagaagggcatcctgcagacagtgaaggtggtggacgagctcgtgaaagtgatgggccggcacaagcccgagaacatcgtgatcgaaatggccagagagaaccagaccacccagaagggacagaagaacagccgcgagagaatgaagcggatcgaagagggcatcaaagagctgggcagccagatcctgaaagaacaccccgtggaaaacacccagctgcagaacgagaagctgtacctgtactacctgcagaatgggcgggatatgtacgtggaccaggaactggacatcaaccggctgtccgactacgatgtggaccatatcgtgcctcagagctttctgaaggacgactccatcgacaacaaggtgctgaccagaagcgacaagaaccggggcaagagcgacaacgtgccctccgaagaggtcgtgaagaagatgaagaactactggcggcagctgctgaacgccaagctgattacccagagaaagttcgacaatctgaccaaggccgagagaggcggcctgagcgaactggataaggccggcttcatcaagagacagctggtggaaacccggcagatcacaaagcacgtggcacagatcctggactcccggatgaacactaagtacgacgagaatgacaagctgatccgggaagtgaaagtgatcaccctgaagtccaagctggtgtccgatttccggaaggatttccagttttacaaagtgcgcgagatcaacaactaccaccacgcccacgacgcctacctgaacgccgtcgtgggaaccgccctgatcaaaaagtaccctaagctggaaagcgagttcgtgtacggcgactacaaggtgtacgacgtgcggaagatgatcgccaagagcgagcaggaaatcggcaaggctaccgccaagtacttcttctacagcaacatcatgaactttttcaagaccgagattaccctggccaacggcgagatccggaagcggcctctgatcgagacaaacggcgaaaccggggagatcgtgtgggataagggccgggattttgccaccgtgcggaaagtgctgagcatgccccaagtgaatatcgtgaaaaagaccgaggtgcagacaggcggcttcagcaaagagtctatcctgcccaagaggaacagcgataagctgatcgccagaaagaaggactgggaccctaagaagtacggcggcttcgacagccccaccgtggcctattctgtgctggtggtggccaaagtggaaaagggcaagtccaagaaactgaagagtgtgaaagagctgctggggatcaccatcatggaaagaagcagcttcgagaagaatcccatcgactttctggaagccaagggctacaaagaagtgaaaaaggacctgatcatcaagctgcctaagtactccctgttcgagctggaaaacggccggaagagaatgctggcctctgccggcgaactgcagaagggaaacgaactggccctgccctccaaatatgtgaacttcctgtacctggccagccactatgagaagctgaagggctcccccgaggataatgagcagaaacagctgtttgtggaacagcacaagcactacctggacgagatcatcgagcagatcagcgagttctccaagagagtgatcctggccgacgctaatctggacaaagtgctgtccgcctacaacaagcaccgggataagcccatcagagagcaggccgagaatatcatccacctgtttaccctgaccaatctgggagcccctgccgccttcaagtactttgacaccaccatcgaccggaagaggtacaccagcaccaaagaggtgctggacgccaccctgatccaccagagcatcaccggcctgtacgagacacggatcgacctgtctcagctgggaggcgacaagcgtcctgctgctactaagaaagctggtcaagctaagaaaaagaaatgaatcgattagcaataaaggatcgtttattttcattggaagcgtgtgttggttttttgatcaggcgcgggtaccaggtcgcggccgctctagagcatggctacgtagataagtagcatggcgggttaatcattaactacaaggaacccctagtgatggagttaggaacccctagtgatggagttggccactccctctctgcgcgctcgctcgctcactgaggccgggcgaccaaaggtcgcccgacgcccgggctttgcccgggcggcctcagtgagcgagcgagcgcgcagctgcctgcagg

SEQ ID NO: 901 - DNA, 6909 bp, Artificial Sequence
  source: /note="Description of Artificial Sequence: Synthetic polynucleotide"
aagatgacggtttgtcacatggagttggcaggatgtttgattaaaaacataacaggaagaaaaatgccccgctgtgggcggacaaaatagttgggaactgggaggggtggaaatggagtttttaaggattatttagggaagagtgacaaaatagatgggaactgggtgtagcgtcgtaagctaatacgaaaattaaaaatgacaaaatagtttggaactagatttcacttatctggttcggatctcctaggcgatatcagtgatcacggatctcgaccaattgacattattgaagcaactagtatcgattttatcagggttattgtctcagacctgcaggcagctgcgcgctcgctcgctcactgaggccgcccgggcaaagcccgggcgtcgggcgacctttggtcgcccggcctcagtgagcgagcgagcgcgcagagagggagtggccaactccatcactaggggttcctgtggccaactccatcactaggggttccttgtagttaatgattaacccgccatgctacttatctacgtagccatgctctagattaattaatgcccatgtaaggaggcaaggcctggggacacccgagatgcctggttataattaacccagacatgtggctgcccccccccccccaacacctgctgcctctaaaaataaccctgcatgccatgttcccggcgaagggccagctgtcccccgccagctagactcagcacttagtttaggaaccagtgagcaagtcagcccttggggcagcccatacaaggccatggggctgggcaagctgcacgcctgggtccggggtgggcacggtgcccgggcaacgagctgaaagctcatctgctctcaggggcccctccctggggacagcccctcctggctagtcacaccctgtaggctcctctatataacccaggggcacaggggctgccctcattctaccaccacctccacagcacagacagacactcaggagccagccagcgctagcgccaccatgatggccccaaagaagaagcggaaggtcggtatccacggagtcccagcagccgacaagaagtacagcatcggcctggacatcggcaccaactctgtgggctgggccgtgatcaccgacgagtacaaggtgcccagcaagaaattcaaggtgctgggcaacaccgaccggcacagcatcaagaagaacctgatcggagccctgctgttcgacagcggcgaaacagccgaggccacccggctgaagagaaccgccagaagaagatacaccagacggaagaaccggatctgctatctgcaagagatcttcagcaacgagatggccaaggtggacgacagcttcttccacagactggaagagtccttcctggtggaagaggataagaagcacgagcggcaccccatcttcggcaacatcgtggacgaggtggcctaccacgagaagtaccccaccatctaccacctgagaaagaaactggtggacagcaccgacaaggccgacctgcggctgatctatctggccctggcccacatgatcaagttccggggccacttcctgatcgagggcgacctgaaccccgacaacagcgacgtggacaagctgttcatccagctggtgcagacctacaaccagctgttcgaggaaaaccccatcaacgccagcggcgtggacgccaaggccatcctgtctgccagactgagcaagagcagacggctggaaaatctgatcgcccagctgcccggcgagaagaagaatggcctgttcggcaacctgattgccctgagcctgggcctgacccccaacttcaagagcaacttcgacctggccgaggatgccaaactgcagctgagcaaggacacctacgacgacgacctggacaacctgctggcccagatcggcgaccagtacgccgacctgtttctggccgccaagaacctgtccgacgccatcctgctgagcgacatcctgagagtgaacaccgagatcaccaaggcccccctgagcgcctctatgatcaagagatacgacgagcaccaccaggacctgaccctgctgaaagctctcgtgcggcagcagctgcctgagaagtacaaagagattttcttcgaccagagcaagaacggctacgccggctacattgacggcggagccagccaggaagagttctacaagttcatcaagcccatcctggaaaagatggacggcaccgaggaactgctcgtgaagctgaacagagaggacctgctgcggaagcagcggaccttcgacaacggcagcatcccccaccagatccacctgggagagctgcacgccattctgcggcggcaggaagatttttacccattcctgaaggacaaccgggaaaagatcgagaagatcctgaccttccgcatcccctactacgtgggccctctggccaggggaaacagcagattcgcctggatgaccagaaagagcgaggaaaccatcaccccctggaacttcgaggaagtggtggacaagggcgcttccgcccagagcttcatcgagcggatgaccaacttcgataagaacctgcccaacgagaaggtgctgcccaagcacagcctgctgtacgagtacttcaccgtgtataacgagctgaccaaagtgaaatacgtgaccgagggaatgagaaagcccgccttcctgagcggcgagcagaaaaaggccatcgtggacctgctgttcaagaccaaccggaaagtgaccgtgaagcagctgaaagaggactacttcaagaaaatcgagtgcttcgactccgtggaaatctccggcgtggaagatcggttcaacgcctccctgggcacataccacgatctgctgaaaattatcaaggacaaggacttcctggacaatgaggaaaacgaggacattctggaagatatcgtgctgaccctgacactgtttgaggacagagagatgatcgaggaacggctgaaaacctatgcccacctgttcgacgacaaagtgatgaagcagctgaagcggcggagatacaccggctggggcaggctgagccggaagctgatcaacggcatccgggacaagcagtccggcaagacaatcctggatttcctgaagtccgacggcttcgccaacagaaacttcatgcagctgatccacgacgacagcctgacctttaaagaggacatccagaaagcccaggtgtccggccagggcgatagcctgcacgagcacattgccaatctggccggcagccccgccattaagaagggcatcctgcagacagtgaaggtggtggacgagctcgtgaaagtgatgggccggcacaagcccgagaacatcgtgatcgaaatggccagagagaaccagaccacccagaagggacagaagaacagccgcgagagaatgaagcggatcgaagagggcatcaaagagctgggcagccagatcctgaaagaacaccccgtggaaaacacccagctgcagaacgagaagctgtacctgtactacctgcagaatgggcgggatatgtacgtggaccaggaactggacatcaaccggctgtccgactacgatgtggaccatatcgtgcctcagagctttctgaaggacgactccatcgacaacaaggtgctgaccagaagcgacaagaaccggggcaagagcgacaacgtgccctccgaagaggtcgtgaagaagatgaagaactactggcggcagctgctgaacgccaagctgattacccagagaaagttcgacaatctgaccaaggccgagagaggcggcctgagcgaactggataaggccggcttcatcaagagacagctggtggaaacccggcagatcacaaagcacgtggcacagatcctggactcccggatgaacactaagtacgacgagaatgacaagctgatccgggaagtgaaagtgatcaccctgaagtccaagctggtgtccgatttccggaaggatttccagttttacaaagtgcgcgagatcaacaactaccaccacgcccacgacgcctacctgaacgccgtcgtgggaaccgccctgatcaaaaagtaccctaagctggaaagcgagttcgtgtacggcgactacaaggtgtacgacgtgcggaagatgatcgccaagagcgagcaggaaatcggcaaggctaccgccaagtacttcttctacagcaacatcatgaactttttcaagaccgagattaccctggccaacggcgagatccggaagcggcctctgatcgagacaaacggcgaaaccggggagatcgtgtgggataagggccgggattttgccaccgtgcggaaagtgctgagcatgccccaagtgaatatcgtgaaaaagaccgaggtgcagacaggcggcttcagcaaagagtctatcctgcccaagaggaacagcgataagctgatcgccagaaagaaggactgggaccctaagaagtacggcggcttcgacagccccaccgtggcctattctgtgctggtggtggccaaagtggaaaagggcaagtccaagaaactgaagagtgtgaaagagctgctggggatcaccatcatggaaagaagcagcttcgagaagaatcccatcgactttctggaagccaagggctacaaagaagtgaaaaaggacctgatcatcaagctgcctaagtactccctgttcgagctggaaaacggccggaagagaatgctggcctctgccggcgaactgcagaagggaaacgaactggccctgccctccaaatatgtgaacttcctgtacctggccagccactatgagaagctgaagggctcccccgaggataatgagcagaaacagctgtttgtggaacagcacaagcactacctggacgagatcatcgagcagatcagcgagttctccaagagagtgatcctggccgacgctaatctggacaaagtgctgtccgcctacaacaagcaccgggataagcccatcagagagcaggccgagaatatcatccacctgtttaccctgaccaatctgggagcccctgccgccttcaagtactttgacaccaccatcgaccggaagaggtacaccagcaccaaagaggtgctggacgccaccctgatccaccagagcatcaccggcctgtacgagacacggatcgacctgtctcagctgggaggcgacaagcgtcctgctgctactaagaaagctggtcaagctaagaaaaagaaatgaatcgattagcaataaaggatcgtttattttcattggaagcgtgtgttggttttttgatcaggcgcgggtaccaggtcgcggccgctctagagcatggctacgtagataagtagcatggcgggttaatcattaactacaaggaacccctagtgatggagttaggaacccctagtgatggagttggccactccctctctgcgcgctcgctcgctcactgaggccgggcgaccaaaggtcgcccgacgcccgggctttgcccgggcggcctcagtgagcgagcgagcgcgcagctgcctgcaggcatgcaagctgtagccaaccactagaactatagctagagtcctgggcgaacaaacgatgctcgccttccagaaaaccgaggatgcgaaccacttcatccggggtcagcaccaccggcaagcgccgcgacggccgaggtcttccgatctcctgaagccagggcagatccgtgcacagcaccttgccgtagaagaacagcaaggccgccaatgcctgacgatgcgtggagaccgaaaccttgcgctcgttcgccagccaggacagaaatgcctcgacttcgctgctgcccaaggttgccgggtgacgcacaccgtggaaacggatgaaggcacgaacccagttgacataagcctgttcggttcgtaaactgtaatgcaagtagcgtatgcgctcacgcaactggtccagaaccttgaccgaacgcagcggtggtaacggcgcagtggcggttttcatggcttgttatgactgtttttttgtacagtctatgcctcgggcatccaagcagcaagcgcgttacgccgtgggtcgatgtttgatgttatggagcagcaacgatgttacgcagcagcaacgatgttacgcagcagggcagtcgccctaaaacaaagttaggtggctcaagtatgggcatcattcgcacatgtaggctcggccctgaccaagtcaaatccatgcgggctgctcttgatcttttcggtcgtgagttcggagacgtagccacctactcccaacatcagccggactccgattacctcgggaacttgctccgtagtaagacattcatcgcgcttgctgccttcgaccaagaagcggttgttggcgctctcgcggcttacgttctgcccaagtttgagcagccgcgtagtgagatctatatctatgatctcgcagtctccggcgagcaccggaggcagggcattgccaccgcgctcatcaatctcctcaagcatgaggccaacgcgcttggtgcttatgtgatctacgtgcaagcagattacggtgacgatcccgcagtggctctctatacaaagttgggcatacgggaagaagtgatgcactttgatatcgacccaagtaccgccacctaacaattcgttcaagccgagatcggcttcccggccgcggagttgttcggtaaattgtcacaacgccgcgaatatagtctttaccatgcccttggccacgcccctctttaatacgacgggcaatttgcacttcagaaaatgaagagtttgctttagccataacaaaagtccagtatgctttttcacagcataactggactgatttcagtttacaactattctgtctagtttaagactttattgtcatagtttagatctattttgttcagtttaagactttattgtccgcccacacccgcttacgc

SEQ ID NO: 902 - DNA, 6857 bp, Artificial Sequence
  source: /note="Description of Artificial Sequence: Synthetic polynucleotide"
aagatgacggtttgtcacatggagttggcaggatgtttgattaaaaacataacaggaagaaaaatgccccgctgtgggcggacaaaatagttgggaactgggaggggtggaaatggagtttttaaggattatttagggaagagtgacaaaatagatgggaactgggtgtagcgtcgtaagctaatacgaaaattaaaaatgacaaaatagtttggaactagatttcacttatctggttcggatctcctaggcgatatcagtgatcacggatctcgaccaattgacattattgaagcaactagtatcgattttatcagggttattgtctcagaggccactccctctctgcgcgctcgctcgctcactgaggccgggcgaccaaaggtcgcccgacgcccgggctttgcccgggcggcctcagtgagcgagcgagcgcgcagagagggagtggccaactccatcactaggggttccttgtagttaatgattaacccgccatgctacttatctacgtagccatgctctagattaattaatgcccatgtaaggaggcaaggcctggggacacccgagatgcctggttataattaacccagacatgtggctgcccccccccccccaacacctgctgcctctaaaaataaccctgcatgccatgttcccggcgaagggccagctgtcccccgccagctagactcagcacttagtttaggaaccagtgagcaagtcagcccttggggcagcccatacaaggccatggggctgggcaagctgcacgcctgggtccggggtgggcacggtgcccgggcaacgagctgaaagctcatctgctctcaggggcccctccctggggacagcccctcctggctagtcacaccctgtaggctcctctatataacccaggggcacaggggctgccctcattctaccaccacctccacagcacagacagacactcaggagccagccagcgctagcgccaccatgatggccccaaagaagaagcggaaggtcggtatccacggagtcccagcagccgacaagaagtacagcatcggcctggacatcggcaccaactctgtgggctgggccgtgatcaccgacgagtacaaggtgcccagcaagaaattcaaggtgctgggcaacaccgaccggcacagcatcaagaagaacctgatcggagccctgctgttcgacagcggcgaaacagccgaggccacccggctgaagagaaccgccagaagaagatacaccagacggaagaaccggatctgctatctgcaagagatcttcagcaacgagatggccaaggtggacgacagcttcttccacagactggaagagtccttcctggtggaagaggataagaagcacgagcggcaccccatcttcggcaacatcgtggacgaggtggcctaccacgagaagtaccccaccatctaccacctgagaaagaaactggtggacagcaccgacaaggccgacctgcggctgatctatctggccctggcccacatgatcaagttccggggccacttcctgatcgagggcgacctgaaccccgacaacagcgacgtggacaagctgttcatccagctggtgcagacctacaaccagctgttcgaggaaaaccccatcaacgccagcggcgtggacgccaaggccatcctgtctgccagactgagcaagagcagacggctggaaaatctgatcgcccagctgcccggcgagaagaagaatggcctgttcggcaacctgattgccctgagcctgggcctgacccccaacttcaagagcaacttcgacctggccgaggatgccaaactgcagctgagcaaggacacctacgacgacgacctggacaacctgctggcccagatcggcgaccagtacgccgacctgtttctggccgccaagaacctgtccgacgccatcctgctgagcgacatcctgagagtgaacaccgagatcaccaaggcccccctgagcgcctctatgatcaagagatacgacgagcaccaccaggacctgaccctgctgaaagctctcgtgcggcagcagctgcctgagaagtacaaagagattttcttcgaccagagcaagaacggctacgccggctacattgacggcggagccagccaggaagagttctacaagttcatcaagcccatcctggaaaagatggacggcaccgaggaactgctcgtgaagctgaacagagaggacctgctgcggaagcagcggaccttcgacaacggcagcatcccccaccagatccacctgggagagctgcacgccattctgcggcggcaggaagatttttacccattcctgaaggacaaccgggaaaagatcgagaagatcctgaccttccgcatcccctactacgtgggccctctggccaggggaaacagcagattcgcctggatgaccagaaagagcgaggaaaccatcaccccctggaacttcgaggaagtggtggacaagggcgcttccgcccagagcttcatcgagcggatgaccaacttcgataagaacctgcccaacgagaaggtgctgcccaagcacagcctgctgtacgagtacttcaccgtgtataacgagctgaccaaagtgaaatacgtgaccgagggaatgagaaagcccgccttcctgagcggcgagcagaaaaaggccatcgtggacctgctgttcaagaccaaccggaaagtgaccgtgaagcagctgaaagaggactacttcaagaaaatcgagtgcttcgactccgtggaaatctccggcgtggaagatcggttcaacgcctccctgggcacataccacgatctgctgaaaattatcaaggacaaggacttcctggacaatgaggaaaacgaggacattctggaagatatcgtgctgaccctgacactgtttgaggacagagagatgatcgaggaacggctgaaaacctatgcccacctgttcgacgacaaagtgatgaagcagctgaagcggcggagatacaccggctggggcaggctgagccggaagctgatcaacggcatccgggacaagcagtccggcaagacaatcctggatttcctgaagtccgacggcttcgccaacagaaacttcatgcagctgatccacgacgacagcctgacctttaaagaggacatccagaaagcccaggtgtccggccagggcgatagcctgcacgagcacattgccaatctggccggcagccccgccattaagaagggcatcctgcagacagtgaaggtggtggacgagctcgtgaaagtgatgggccggcacaagcccgagaacatcgtgatcgaaatggccagagagaaccagaccacccagaagggacagaagaacagccgcgagagaatgaagcggatcgaagagggcatcaaagagctgggcagccagatcctgaaagaacaccccgtggaaaacacccagctgcagaacgagaagctgtacctgtactacctgcagaatgggcgggatatgtacgtggaccaggaactggacatcaaccggctgtccgactacgatgtggaccatatcgtgcctcagagctttctgaaggacgactccatcgacaacaaggtgctgaccagaagcgacaagaaccggggcaagagcgacaacgtgccctccgaagaggtcgtgaagaagatgaagaactactggcggcagctgctgaacgccaagctgattacccagagaaagttcgacaatctgaccaaggccgagagaggcggcctgagcgaactggataaggccggcttcatcaagagacagctggtggaaacccggcagatcacaaagcacgtggcacagatcctggactcccggatgaacactaagtacgacgagaatgacaagctgatccgggaagtgaaagtgatcaccctgaagtccaagctggtgtccgatttccggaaggatttccagttttacaaagtgcgcgagatcaacaactaccaccacgcccacgacgcctacctgaacgccgtcgtgggaaccgccctgatcaaaaagtaccctaagctggaaagcgagttcgtgtacggcgactacaaggtgtacgacgtgcggaagatgatcgccaagagcgagcaggaaatcggcaaggctaccgccaagtacttcttctacagcaacatcatgaactttttcaagaccgagattaccctggccaacggcgagatccggaagcggcctctgatcgagacaaacggcgaaaccggggagatcgtgtgggataagggccgggattttgccaccgtgcggaaagtgctgagcatgccccaagtgaatatcgtgaaaaagaccgaggtgcagacaggcggcttcagcaaagagtctatcctgcccaagaggaacagcgataagctgatcgccagaaagaaggactgggaccctaagaagtacggcggcttcgacagccccaccgtggcctattctgtgctggtggtggccaaagtggaaaagggcaagtccaagaaactgaagagtgtgaaagagctgctggggatcaccatcatggaaagaagcagcttcgagaagaatcccatcgactttctggaagccaagggctacaaagaagtgaaaaaggacctgatcatcaagctgcctaagtactccctgttcgagctggaaaacggccggaagagaatgctggcctctgccggcgaactgcagaagggaaacgaactggccctgccctccaaatatgtgaacttcctgtacctggccagccactatgagaagctgaagggctcccccgaggataatgagcagaaacagctgtttgtggaacagcacaagcactacctggacgagatcatcgagcagatcagcgagttctccaagagagtgatcctggccgacgctaatctggacaaagtgctgtccgcctacaacaagcaccgggataagcccatcagagagcaggccgagaatatcatccacctgtttaccctgaccaatctgggagcccctgccgccttcaagtactttgacaccaccatcgaccggaagaggtacaccagcaccaaagaggtgctggacgccaccctgatccaccagagcatcaccggcctgtacgagacacggatcgacctgtctcagctgggaggcgacaagcgtcctgctgctactaagaaagctggtcaagctaagaaaaagaaatgaatcgattagcaataaaggatcgtttattttcattggaagcgtgtgttggttttttgatcaggcgcgggtaccaggtcgcggccgctctagagcatggctacgtagataagtagcatggcgggttaatcattaactacaaggaacccctagtgatggagttggccactccctctctgcgcgctcgctcgctcactgaggccgggcgaccaaaggtcgcccgacgcccgggctttgcccgggcggcctcagtgagcgagcgagcgcgcagagagggacatgcaagctgtagccaaccactagaactatagctagagtcctgggcgaacaaacgatgctcgccttccagaaaaccgaggatgcgaaccacttcatccggggtcagcaccaccggcaagcgccgcgacggccgaggtcttccgatctcctgaagccagggcagatccgtgcacagcaccttgccgtagaagaacagcaaggccgccaatgcctgacgatgcgtggagaccgaaaccttgcgctcgttcgccagccaggacagaaatgcctcgacttcgctgctgcccaaggttgccgggtgacgcacaccgtggaaacggatgaaggcacgaacccagttgacataagcctgttcggttcgtaaactgtaatgcaagtagcgtatgcgctcacgcaactggtccagaaccttgaccgaacgcagcggtggtaacggcgcagtggcggttttcatggcttgttatgactgtttttttgtacagtctatgcctcgggcatccaagcagcaagcgcgttacgccgtgggtcgatgtttgatgttatggagcagcaacgatgttacgcagcagcaacgatgttacgcagcagggcagtcgccctaaaacaaagttaggtggctcaagtatgggcatcattcgcacatgtaggctcggccctgaccaagtcaaatccatgcgggctgctcttgatcttttcggtcgtgagttcggagacgtagccacctactcccaacatcagccggactccgattacctcgggaacttgctccgtagtaagacattcatcgcgcttgctgccttcgaccaagaagcggttgttggcgctctcgcggcttacgttctgcccaagtttgagcagccgcgtagtgagatctatatctatgatctcgcagtctccggcgagcaccggaggcagggcattgccaccgcgctcatcaatctcctcaagcatgaggccaacgcgcttggtgcttatgtgatctacgtgcaagcagattacggtgacgatcccgcagtggctctctatacaaagttgggcatacgggaagaagtgatgcactttgatatcgacccaagtaccgccacctaacaattcgttcaagccgagatcggcttcccggccgcggagttgttcggtaaattgtcacaacgccgcgaatatagtctttaccatgcccttggccacgcccctctttaatacgacgggcaatttgcacttcagaaaatgaagagtttgctttagccataacaaaagtccagtatgctttttcacagcataactggactgatttcagtttacaactattctgtctagtttaagactttattgtcatagtttagatctattttgttcagtttaagactttattgtccgcccacacccgcttacgc

SEQ ID NO: 903 - DNA, 60 bp, Artificial Sequence
  source: /note="Description of Artificial Sequence: Synthetic oligonucleotide"
tagcaataaaggatcgtttattttcattggaagcgtgtgttggttttttgatcaggcgcg

SEQ ID NO: 904 - DNA, 3 bp, Unknown
  source: /note="Description of Unknown: stop codon oligonucleotide"
tag

SEQ ID NO: 905 - DNA, 3 bp, Unknown
  source: /note="Description of Unknown: stop codon oligonucleotide"
taa

SEQ ID NO: 906 - DNA, 3 bp, Unknown
  source: /note="Description of Unknown: stop codon oligonucleotide"
tga

SEQ ID NO: 907 - DNA, 166 bp, Artificial Sequence
  source: /note="Description of Artificial Sequence: Synthetic polynucleotide"
tgtgggcggacaaaatagttgggaactgggaggggtggaaatggagtttttaaggattatttagggaagagtgacaaaatagatgggaactgggtgtagcgtcgtaagctaatacgaaaattaaaaatgacaaaatagtttggaactagatttcacttatctggtt

SEQ ID NO: 908 - DNA, 225 bp, Artificial Sequence
  source: /note="Description of Artificial Sequence: Synthetic polynucleotide"
gaatatagtctttaccatgcccttggccacgcccctctttaatacgacgggcaatttgcacttcagaaaatgaagagtttgctttagccataacaaaagtccagtatgctttttcacagcataactggactgatttcagtttacaactattctgtctagtttaagactttattgtcatagtttagatctattttgttcagtttaagactttattgtccgcccaca

SEQ ID NO: 909 - DNA, 1155 bp, Artificial Sequence
  source: /note="Description of Artificial Sequence: Synthetic polynucleotide"
catgcaagctgtagccaaccactagaactatagctagagtcctgggcgaacaaacgatgctcgccttccagaaaaccgaggatgcgaaccacttcatccggggtcagcaccaccggcaagcgccgcgacggccgaggtcttccgatctcctgaagccagggcagatccgtgcacagcaccttgccgtagaagaacagcaaggccgccaatgcctgacgatgcgtggagaccgaaaccttgcgctcgttcgccagccaggacagaaatgcctcgacttcgctgctgcccaaggttgccgggtgacgcacaccgtggaaacggatgaaggcacgaacccagttgacataagcctgttcggttcgtaaactgtaatgcaagtagcgtatgcgctcacgcaactggtccagaaccttgaccgaacgcagcggtggtaacggcgcagtggcggttttcatggcttgttatgactgtttttttgtacagtctatgcctcgggcatccaagcagcaagcgcgttacgccgtgggtcgatgtttgatgttatggagcagcaacgatgttacgcagcagcaacgatgttacgcagcagggcagtcgccctaaaacaaagttaggtggctcaagtatgggcatcattcgcacatgtaggctcggccctgaccaagtcaaatccatgcgggctgctcttgatcttttcggtcgtgagttcggagacgtagccacctactcccaacatcagccggactccgattacctcgggaacttgctccgtagtaagacattcatcgcgcttgctgccttcgaccaagaagcggttgttggcgctctcgcggcttacgttctgcccaagtttgagcagccgcgtagtgagatctatatctatgatctcgcagtctccggcgagcaccggaggcagggcattgccaccgcgctcatcaatctcctcaagcatgaggccaacgcgcttggtgcttatgtgatctacgtgcaagcagattacggtgacgatcccgcagtggctctctatacaaagttgggcatacgggaagaagtgatgcactttgatatcgacccaagtaccgccacctaacaattcgttcaagccgagatcggcttcccggccgcggagttgttcggtaaattgtcacaacgccg

SEQ ID NO: 910 - DNA, 2861 bp, Artificial Sequence
  source: /note="Description of Artificial Sequence: Synthetic polynucleotide"
ccactccctctatgcgcgctcgctcactcactcggccctggagaccaaaggtctccagactgccggcctctggccggcagggccgagtgagtgagcgagcgcgcatagagggagtgggtacctccatcatctaggtttgccagatctgatatcggcgcgcccctgggcgcgcccgagtccaacacccgtgggaatcccatgggcaccatggcccctcgctccaaaaatgctttcgcgtcgcgcagacactgctcggtagtttcggggatcagcgtttgagtaagagcccgcgtctgaaccctccgcgccgccccggccccagtggaaagacgcgcaggcaaaacgcaccacgtgacggagcgtgaccgcgcgccgagcgcgcgccaaggtcgggcaggaagagggcctatttcccatgattccttcatatttgcatatacgatacaaggctgttagagagataattagaattaatttgactgtaaacacaaagatattagtacaaaatacgtgacgtagaaagtaataatttcttgggtagtttgcagttttaaaattatgttttaaaatggactatcatatgcttaccgtaacttgaaagtatttcgatttcttggctttatatatcttgtggaaaggacgaaacaccgcactagagtaacagtctgacgtttaagagctatgctggaaacagcatagcaagtttaaataaggctagtccgttatcaacttgaaaaagtggcaccgagtcggtgctttttttgcggccgcgctcggcgcgcccatatttgcatgtcgctatgtgttctgggaaatcaccataaacgtgaaatgtctttggatttgggaatcttataagttctgtatgagaccacggtacaccgcactagagtaacagtctgacgtttaagagctatgctggaaacagcatagcaagtttaaataaggctagtccgttatcaacttgaaaaagtggcaccgagtcggtgctttttttgcggccgctgacggcgcgccctgcagtatttagcatgccccacccatctgcaaggcattctggatagtgtcaaaacagccggaaatcaagtccgtttatctcaaactttagcattttgggaataaatgatatttgctatgctggttaaattagattttagttaaatttcctgctgaagctctagtacgataagtaacttgacctaagtgtaaagttgagatttccttcaggtttatatagcttgtgcgccgcctgggtacaccgcactagagtaacagtctgacgtttaagagctatgctggaaacagcatagcaagtttaaataaggctagtccgttatcaacttgaaaaagtggcaccgagtcggtgctttttttgcggccgcgcttgcggccgcctcgagtgatcaaaaaaaccaacacacgcttccaatgaaaataaacgatcctttattgctagcctttacttgtacagctcgtccatgccgagagtgatcccggcggcggtcacgaactccagcaggaccatgtgatcgcgcttctcgttggggtctttgctcagggcggactgggtgctcaggtagtggttgtcgggcagcaacacggggccgtcgccgatgggggtgttctgctggtagtggtcggcgagctgcacgctgccgtcctcgatgttgtggcggatcttgaagttcaccttgatgccgttcttctgcttgtcggccatgatatagacgttgtggctgttgtagttgtactccagcttgtgccccaggatgttgccgtcctccttgaagtcgatgcccttcagctcgatgcggttcaccagggtgtcgccctcgaacttcacctcggcgcgggtcttgtagttgccgtcgtccttgaagaagatggtgcgctcctggacgtagccttcgggcatggcggacttgaagaagtcgtgctgcttcatgtggtcggggtagcggctgaagcactgcacgccgtaggtcagggtggtcacgagggtgggccagggcacgggcagcttgccggtggtgcagatgaacttcagggtcagcttgccgtaggtggcatcgccctcgccctcgccggacacgctgaacttgtggccgtttacgtcgccgtccagctcgaccaggatgggcaccaccccggtgaacagctcctcgcccttgctcaccatggtggcgaccggtggatcccgggcccgcggggtggctttaccaacagtacccggaatgccaagcttacttagatcgcagtctcgacgctggctggctcctgagtgtctgtctgtgctgtggaggtggtggtagaatgagggcagcccctgtgcccctgggttatatagaggagcctacagggtgtgactagccaggaggggctgtccccagggaggggcccctgagagcagatgagctttcagctcgttgcccgggcaccgtgcccaccccggacccaggcgtgcagcttgcccagccccatggccttgtatgggctgccccaagggctgacttgctcactggttcctaaactaagtgctgagtctagctggcgggggacagctggcccttcgccgggaacatggcatgcagggttatttttagaggcagcaggtgttgggggggggggggcagccacatgtctgggttaattataaccaggcatctcgggtgtccccaggccttgcctccttacatgggcacgtcgacgatatcagatctaggaacccctagtgatggagttggccactccctctctgcgcgctcgctcgctcactgaggccgcccgggcaaagcccgggcgtcgggcgacctttggtcgcccggcctcagtgagcgagcgagcgcgcagagagggagtgg

SEQ ID NO: 911 - DNA, 2861 bp, Artificial Sequence
  source: /note="Description of Artificial Sequence: Synthetic polynucleotide"
cctgcaggcagctgcgcgctcgctcgctcactgaggccgcccgggcaaagcccgggcgtcgggcgacctttggtcgcccggcctcagtgagcgagcgagcgcgcagagagggagtggccaactccatcactaggggttcctagatctgatatcggcgcgcccctgggcgcgcccgagtccaacacccgtgggaatcccatgggcaccatggcccctcgctccaaaaatgctttcgcgtcgcgcagacactgctcggtagtttcggggatcagcgtttgagtaagagcccgcgtctgaaccctccgcgccgccccggccccagtggaaagacgcgcaggcaaaacgcaccacgtgacggagcgtgaccgcgcgccgagcgcgcgccaaggtcgggcaggaagagggcctatttcccatgattccttcatatttgcatatacgatacaaggctgttagagagataattagaattaatttgactgtaaacacaaagatattagtacaaaatacgtgacgtagaaagtaataatttcttgggtagtttgcagttttaaaattatgttttaaaatggactatcatatgcttaccgtaacttgaaagtatttcgatttcttggctttatatatcttgtggaaaggacgaaacaccgcactagagtaacagtctgacgtttaagagctatgctggaaacagcatagcaagtttaaataaggctagtccgttatcaacttgaaaaagtggcaccgagtcggtgctttttttgcggccgcgctcggcgcgcccatatttgcatgtcgctatgtgttctgggaaatcaccataaacgtgaaatgtctttggatttgggaatcttataagttctgtatgagaccacggtacaccgcactagagtaacagtctgacgtttaagagctatgctggaaacagcatagcaagtttaaataaggctagtccgttatcaacttgaaaaagtggcaccgagtcggtgctttttttgcggccgctgacggcgcgccctgcagtatttagcatgccccacccatctgcaaggcattctggatagtgtcaaaacagccggaaatcaagtccgtttatctcaaactttagcattttgggaataaatgatatttgctatgctggttaaattagattttagttaaatttcctgctgaagctctagtacgataagtaacttgacctaagtgtaaagttgagatttccttcaggtttatatagcttgtgcgccgcctgggtacaccgcactagagtaacagtctgacgtttaagagctatgctggaaacagcatagcaagtttaaataaggctagtccgttatcaacttgaaaaagtggcaccgagtcggtgctttttttgcggccgcgcttgcggccgcctcgagtgatcaaaaaaaccaacacacgcttccaatgaaaataaacgatcctttattgctagcctttacttgtacagctcgtccatgccgagagtgatcccggcggcggtcacgaactccagcaggaccatgtgatcgcgcttctcgttggggtctttgctcagggcggactgggtgctcaggtagtggttgtcgggcagcaacacggggccgtcgccgatgggggtgttctgctggtagtggtcggcgagctgcacgctgccgtcctcgatgttgtggcggatcttgaagttcaccttgatgccgttcttctgcttgtcggccatgatatagacgttgtggctgttgtagttgtactccagcttgtgccccaggatgttgccgtcctccttgaagtcgatgcccttcagctcgatgcggttcaccagggtgtcgccctcgaacttcacctcggcgcgggtcttgtagttgccgtcgtccttgaagaagatggtgcgctcctggacgtagccttcgggcatggcggacttgaagaagtcgtgctgcttcatgtggtcggggtagcggctgaagcactgcacgccgtaggtcagggtggtcacgagggtgggccagggcacgggcagcttgccggtggtgcagatgaacttcagggtcagcttgccgtaggtggcatcgccctcgccctcgccggacacgctgaacttgtggccgtttacgtcgccgtccagctcgaccaggatgggcaccaccccggtgaacagctcctcgcccttgctcaccatggtggcgaccggtggatcccgggcccgcggggtggctttaccaacagtacccggaatgccaagcttacttagatcgcagtctcgacgctggctggctcctgagtgtctgtctgtgctgtggaggtggtggtagaatgagggcagcccctgtgcccctgggttatatagaggagcctacagggtgtgactagccaggaggggctgtccccagggaggggcccctgagagcagatgagctttcagctcgttgcccgggcaccgtgcccaccccggacccaggcgtgcagcttgcccagccccatggccttgtatgggctgccccaagggctgacttgctcactggttcctaaactaagtgctgagtctagctggcgggggacagctggcccttcgccgggaacatggcatgcagggttatttttagaggcagcaggtgttgggggggggggggcagccacatgtctgggttaattataaccaggcatctcgggtgtccccaggccttgcctccttacatgggcacgtcgacgatatcagatctaggaacccctagtgatggagttggccactccctctctgcgcgctcgctcgctcactgaggccgggcgaccaaaggtcgcccgacgcccgggctttgcccgggcggcctcagtgagcgagcgagcgcgcagctgcctgcagg

SEQ ID NO: 912 - DNA, 4585 bp, Artificial Sequence
  source: /note="Description of Artificial Sequence: Synthetic polynucleotide"
aagatgacggtttgtcacatggagttggcaggatgtttgattaaaaacataacaggaagaaaaatgccccgctgtgggcggacaaaatagttgggaactgggaggggtggaaatggagtttttaaggattatttagggaagagtgacaaaatagatgggaactgggtgtagcgtcgtaagctaatacgaaaattaaaaatgacaaaatagtttggaactagatttcacttatctggttcggatctcctaggcgatatcagtgatcacggatctcgaccaattgacattattgaagcaactagtatcgattttatcagggttattgtctcagacctgcaggcagctgcgcgctcgctcgctcactgaggccgcccgggcaaagcccgggcgtcgggcgacctttggtcgcccggcctcagtgagcgagcgagcgcgcagagagggagtggccaactccatcactaggggttcctagatctgatatcggcgcgcccctgggcgcgcccgagtccaacacccgtgggaatcccatgggcaccatggcccctcgctccaaaaatgctttcgcgtcgcgcagacactgctcggtagtttcggggatcagcgtttgagtaagagcccgcgtctgaaccctccgcgccgccccggccccagtggaaagacgcgcaggcaaaacgcaccacgtgacggagcgtgaccgcgcgccgagcgcgcgccaaggtcgggcaggaagagggcctatttcccatgattccttcatatttgcatatacgatacaaggctgttagagagataattagaattaatttgactgtaaacacaaagatattagtacaaaatacgtgacgtagaaagtaataatttcttgggtagtttgcagttttaaaattatgttttaaaatggactatcatatgcttaccgtaacttgaaagtatttcgatttcttggctttatatatcttgtggaaaggacgaaacaccgcactagagtaacagtctgacgtttaagagctatgctggaaacagcatagcaagtttaaataaggctagtccgttatcaacttgaaaaagtggcaccgagtcggtgctttttttgcggccgcgcttcggcgcgcccatatttgcatgtcgctatgtgttctgggaaatcaccataaacgtgaaatgtctttggatttgggaatcttataagttctgtatgagaccacggtacaccgcactagagtaacagtctgacgtttaagagctatgctggaaacagcatagcaagtttaaataaggctagtccgttatcaacttgaaaaagtggcaccgagtcggtgctttttttgcggccgctgacggcgcgccctgcagtatttagcatgccccacccatctgcaaggcattctggatagtgtcaaaacagccggaaatcaagtccgtttatctcaaactttagcattttgggaataaatgatatttgctatgctggttaaattagattttagttaaatttcctgctgaagctctagtacgataagtaacttgacctaagtgtaaagttgagatttccttcaggtttatatagcttgtgcgccgcctgggtacaccgcactagagtaacagtctgacgtttaagagctatgctggaaacagcatagcaagtttaaataaggctagtccgttatcaacttgaaaaagtggcaccgagtcggtgctttttttgcggccgcgctgcggccgcctcgagtgatcaaaaaaaccaacacacgcttccaatgaaaataaacgatcctttattgctagcctttacttgtacagctcgtccatgccgagagtgatcccggcggcggtcacgaactccagcaggaccatgtgatcgcgcttctcgttggggtctttgctcagggcggactgggtgctcaggtagtggttgtcgggcagcaacacggggccgtcgccgatgggggtgttctgctggtagtggtcggcgagctgcacgctgccgtcctcgatgttgtggcggatcttgaagttcaccttgatgccgttcttctgcttgtcggccatgatatagacgttgtggctgttgtagttgtactccagcttgtgccccaggatgttgccgtcctccttgaagtcgatgcccttcagctcgatgcggttcaccagggtgtcgccctcgaacttcacctcggcgcgggtcttgtagttgccgtcgtccttgaagaagatggtgcgctcctggacgtagccttcgggcatggcggacttgaagaagtcgtgctgcttcatgtggtcggggtagcggctgaagcactgcacgccgtaggtcagggtggtcacgagggtgggccagggcacgggcagcttgccggtggtgcagatgaacttcagggtcagcttgccgtaggtggcatcgccctcgccctcgccggacacgctgaacttgtggccgtttacgtcgccgtccagctcgaccaggatgggcaccaccccggtgaacagctcctcgcccttgctcaccatggtggcgaccggtggatcccgggcccgcggggtggctttaccaacagtacccggaatgccaagcttacttagatcgcagtctcgacgctggctggctcctgagtgtctgtctgtgctgtggaggtggtggtagaatgagggcagcccctgtgcccctgggttatatagaggagcctacagggtgtgactagccaggaggggctgtccccagggaggggcccctgagagcagatgagctttcagctcgttgcccgggcaccgtgcccaccccggacccaggcgtgcagcttgcccagccccatggccttgtatgggctgccccaagggctgacttgctcactggttcctaaactaagtgctgagtctagctggcgggggacagctggcccttcgccgggaacatggcatgcagggttatttttagaggcagcaggtgttgggggggggggggcagccacatgtctgggttaattataaccaggcatctcgggtgtccccaggccttgcctccttacatgggcacgtcgacgatatcagatctaggaacccctagtgatggagttggccactccctctctgcgcgctcgctcgctcactgaggccgggcgaccaaaggtcgcccgacgcccgggctttgcccgggcggcctcagtgagcgagcgagcgcgcagctgcctgcaggcatgcaagctgtagccaaccactagaactatagctagagtcctgggcgaacaaacgatgctcgccttccagaaaaccgaggatgcgaaccacttcatccggggtcagcaccaccggcaagcgccgcgacggccgaggtcttccgatctcctgaagccagggcagatccgtgcacagcaccttgccgtagaagaacagcaaggccgccaatgcctgacgatgcgtggagaccgaaaccttgcgctcgttcgccagccaggacagaaatgcctcgacttcgctgctgcccaaggttgccgggtgacgcacaccgtggaaacggatgaaggcacgaacccagttgacataagcctgttcggttcgtaaactgtaatgcaagtagcgtatgcgctcacgcaactggtccagaaccttgaccgaacgcagcggtggtaacggcgcagtggcggttttcatggcttgttatgactgtttttttgtacagtctatgcctcgggcatccaagcagcaagcgcgttacgccgtgggtcgatgtttgatgttatggagcagcaacgatgttacgcagcagcaacgatgttacgcagcagggcagtcgccctaaaacaaagttaggtggctcaagtatgggcatcattcgcacatgtaggctcggccctgaccaagtcaaatccatgcgggctgctcttgatcttttcggtcgtgagttcggagacgtagccacctactcccaacatcagccggactccgattacctcgggaacttgctccgtagtaagacattcatcgcgcttgctgccttcgaccaagaagcggttgttggcgctctcgcggcttacgttctgcccaagtttgagcagccgcgtagtgagatctatatctatgatctcgcagtctccggcgagcaccggaggcagggcattgccaccgcgctcatcaatctcctcaagcatgaggccaacgcgcttggtgcttatgtgatctacgtgcaagcagattacggtgacgatcccgcagtggctctctatacaaagttgggcatacgggaagaagtgatgcactttgatatcgacccaagtaccgccacctaacaattcgttcaagccgagatcggcttcccggccgcggagttgttcggtaaattgtcacaacgccgcgaatatagtctttaccatgcccttggccacgcccctctttaatacgacgggcaatttgcacttcagaaaatgaagagtttgctttagccataacaaaagtccagtatgctttttcacagcataactggactgatttcagtttacaactattctgtctagtttaagactttattgtcatagtttagatctattttgttcagtttaagactttattgtccgcccacacccgcttacgc

SEQ ID NO: 913 - DNA, 4585 bp, Artificial Sequence
  source: /note="Description of Artificial Sequence: Synthetic polynucleotide"
aagatgacggtttgtcacatggagttggcaggatgtttgattaaaaacataacaggaagaaaaatgccccgctgtgggcggacaaaatagttgggaactgggaggggtggaaatggagtttttaaggattatttagggaagagtgacaaaatagatgggaactgggtgtagcgtcgtaagctaatacgaaaattaaaaatgacaaaatagtttggaactagatttcacttatctggttcggatctcctaggcgatatcagtgatcacggatctcgaccaattgacattattgaagcaactagtatcgattttatcagggttattgtctcagaccactccctctatgcgcgctcgctcactcactcggccctggagaccaaaggtctccagactgccggcctctggccggcagggccgagtgagtgagcgagcgcgcatagagggagtgggtacctccatcatctaggtttgccagatctgatatcggcgcgcccctgggcgcgcccgagtccaacacccgtgggaatcccatgggcaccatggcccctcgctccaaaaatgctttcgcgtcgcgcagacactgctcggtagtttcggggatcagcgtttgagtaagagcccgcgtctgaaccctccgcgccgccccggccccagtggaaagacgcgcaggcaaaacgcaccacgtgacggagcgtgaccgcgcgccgagcgcgcgccaaggtcgggcaggaagagggcctatttcccatgattccttcatatttgcatatacgatacaaggctgttagagagataattagaattaatttgactgtaaacacaaagatattagtacaaaatacgtgacgtagaaagtaataatttcttgggtagtttgcagttttaaaattatgttttaaaatggactatcatatgcttaccgtaacttgaaagtatttcgatttcttggctttatatatcttgtggaaaggacgaaacaccgcactagagtaacagtctgacgtttaagagctatgctggaaacagcatagcaagtttaaataaggctagtccgttatcaacttgaaaaagtggcaccgagtcggtgctttttttgcggccgcgcttcggcgcgcccatatttgcatgtcgctatgtgttctgggaaatcaccataaacgtgaaatgtctttggatttgggaatcttataagttctgtatgagaccacggtacaccgcactagagtaacagtctgacgtttaagagctatgctggaaacagcatagcaagtttaaataaggctagtccgttatcaacttgaaaaagtggcaccgagtcggtgctttttttgcggccgctgacggcgcgccctgcagtatttagcatgccccacccatctgcaaggcattctggatagtgtcaaaacagccggaaatcaagtccgtttatctcaaactttagcattttgggaataaatgatatttgctatgctggttaaattagattttagttaaatttcctgctgaagctctagtacgataagtaacttgacctaagtgtaaagttgagatttccttcaggtttatatagcttgtgcgccgcctgggtacaccgcactagagtaacagtctgacgtttaagagctatgctggaaacagcatagcaagtttaaataaggctagtccgttatcaacttgaaaaagtggcaccgagtcggtgctttttttgcggccgcgctgcggccgcctcgagtgatcaaaaaaaccaacacacgcttccaatgaaaataaacgatcctttattgctagcctttacttgtacagctcgtccatgccgagagtgatcccggcggcggtcacgaactccagcaggaccatgtgatcgcgcttctcgttggggtctttgctcagggcggactgggtgctcaggtagtggttgtcgggcagcaacacggggccgtcgccgatgggggtgttctgctggtagtggtcggcgagctgcacgctgccgtcctcgatgttgtggcggatcttgaagttcaccttgatgccgttcttctgcttgtcggccatgatatagacgttgtggctgttgtagttgtactccagcttgtgccccaggatgttgccgtcctccttgaagtcgatgcccttcagctcgatgcggttcaccagggtgtcgccctcgaacttcacctcggcgcgggtcttgtagttgccgtcgtccttgaagaagatggtgcgctcctggacgtagccttcgggcatggcggacttgaagaagtcgtgctgcttcatgtggtcggggtagcggctgaagcactgcacgccgtaggtcagggtggtcacgagggtgggccagggcacgggcagcttgccggtggtgcagatgaacttcagggtcagcttgccgtaggtggcatcgccctcgccctcgccggacacgctgaacttgtggccgtttacgtcgccgtccagctcgaccaggatgggcaccaccccggtgaacagctcctcgcccttgctcaccatggtggcgaccggtggatcccgggcccgcggggtggctttaccaacagtacccggaatgccaagcttacttagatcgcagtctcgacgctggctggctcctgagtgtctgtctgtgctgtggaggtggtggtagaatgagggcagcccctgtgcccctgggttatatagaggagcctacagggtgtgactagccaggaggggctgtccccagggaggggcccctgagagcagatgagctttcagctcgttgcccgggcaccgtgcccaccccggacccaggcgtgcagcttgcccagccccatggccttgtatgggctgccccaagggctgacttgctcactggttcctaaactaagtgctgagtctagctggcgggggacagctggcccttcgccgggaacatggcatgcagggttatttttagaggcagcaggtgttgggggggggggggcagccacatgtctgggttaattataaccaggcatctcgggtgtccccaggccttgcctccttacatgggcacgtcgacgatatcagatctaggaacccctagtgatggagttggccactccctctctgcgcgctcgctcgctcactgaggccgcccgggcaaagcccgggcgtcgggcgacctttggtcgcccggcctcagtgagcgagcgagcgcgcagagagggagtggcatgcaagctgtagccaaccactagaactatagctagagtcctgggcgaacaaacgatgctcgccttccagaaaaccgaggatgcgaaccacttcatccggggtcagcaccaccggcaagcgccgcgacggccgaggtcttccgatctcctgaagccagggcagatccgtgcacagcaccttgccgtagaagaacagcaaggccgccaatgcctgacgatgcgtggagaccgaaaccttgcgctcgttcgccagccaggacagaaatgcctcgacttcgctgctgcccaaggttgccgggtgacgcacaccgtggaaacggatgaaggcacgaacccagttgacataagcctgttcggttcgtaaactgtaatgcaagtagcgtatgcgctcacgcaactggtccagaaccttgaccgaacgcagcggtggtaacggcgcagtggcggttttcatggcttgttatgactgtttttttgtacagtctatgcctcgggcatccaagcagcaagcgcgttacgccgtgggtcgatgtttgatgttatggagcagcaacgatgttacgcagcagcaacgatgttacgcagcagggcagtcgccctaaaacaaagttaggtggctcaagtatgggcatcattcgcacatgtaggctcggccctgaccaagtcaaatccatgcgggctgctcttgatcttttcggtcgtgagttcggagacgtagccacctactcccaacatcagccggactccgattacctcgggaacttgctccgtagtaagacattcatcgcgcttgctgccttcgaccaagaagcggttgttggcgctctcgcggcttacgttctgcccaagtttgagcagccgcgtagtgagatctatatctatgatctcgcagtctccggcgagcaccggaggcagggcattgccaccgcgctcatcaatctcctcaagcatgaggccaacgcgcttggtgcttatgtgatctacgtgcaagcagattacggtgacgatcccgcagtggctctctatacaaagttgggcatacgggaagaagtgatgcactttgatatcgacccaagtaccgccacctaacaattcgttcaagccgagatcggcttcccggccgcggagttgttcggtaaattgtcacaacgccgcgaatatagtctttaccatgcccttggccacgcccctctttaatacgacgggcaatttgcacttcagaaaatgaagagtttgctttagccataacaaaagtccagtatgctttttcacagcataactggactgatttcagtttacaactattctgtctagtttaagactttattgtcatagtttagatctattttgttcagtttaagactttattgtccgcccacacccgcttacgc

SEQ ID NO: 914 - DNA, 2285 bp, Artificial Sequence
  source: /note="Description of Artificial Sequence: Synthetic polynucleotide"
ccactccctctatgcgcgctcgctcactcactcggccctggagaccaaaggtctccagactgccggcctctggccggcagggccgagtgagtgagcgagcgcgcatagagggagtgggtacctccatcatctaggtttgccagatctgatatcggcgcgcccctgggcgcgcccgagtccaacacccgtgggaatcccatgggcaccatggcccctcgctccaaaaatgctttcgcgtcgcgcagacactgctcggtagtttcggggatcagcgtttgagtaagagcccgcgtctgaaccctccgcgccgccccggccccagtggaaagacgcgcaggcaaaacgcaccacgtgacggagcgtgaccgcgcgccgagcgcgcgccaaggtcgggcaggaagagggcctatttcccatgattccttcatatttgcatatacgatacaaggctgttagagagataattagaattaatttgactgtaaacacaaagatattagtacaaaatacgtgacgtagaaagtaataatttcttgggtagtttgcagttttaaaattatgttttaaaatggactatcatatgcttaccgtaacttgaaagtatttcgatttcttggctttatatatcttgtggaaaggacgaaacaccgcaccagagtaacagtctgaggtttaagagctatgctggaaacagcatagcaagtttaaataaggctagtccgttatcaacttgaaaaagtggcaccgagtcggtgctttttttgcggccgcgctcggcgcgcccatatttgcatgtcgctatgtgttctgggaaatcaccataaacgtgaaatgtctttggatttgggaatcttataagttctgtatgagaccacggtacaccgcaccagagtaacagtctgaggtttaagagctatgctggaaacagcatagcaagtttaaataaggctagtccgttatcaacttgaaaaagtggcaccgagtcggtgctttttttgcggccgctgacggcgcgccctgcagtatttagcatgccccacccatctgcaaggcattctggatagtgtcaaaacagccggaaatcaagtccgtttatctcaaactttagcattttgggaataaatgatatttgctatgctggttaaattagattttagttaaatttcctgctgaagctctagtacgataagtaacttgacctaagtgtaaagttgagatttccttcaggtttatatagcttgtgcgccgcctgggtacaccgcaccagagtaacagtctgaggtttaagagctatgctggaaacagcatagcaagtttaaataaggctagtccgttatcaacttgaaaaagtggcaccgagtcggtgctttttttgcggccgcgctgtttaaaccaacaaaatcagcagctaatgaaggcaagtcagcaggtcactcatcattttccacttcggcaatgcagtgggattattccaacagaggtttttcacagcattccttcagttaactggagatcgaatcttgattttcacagatatacttggcaaggtccgccctgtcatcagcacattcaagcagatctccatggcagcattccgtgtggacttaggtaagatctgtcactaacttggaaacttctgcaaactcagcttagggaaatctctggctcaggcgagctactgcctcagcttagaaagctctttctccaaattattggagactggcacacttaagtccctgttaggcagacgaagccttcccttcatcccgaagttcatcgagctttggcaacaggcaggcagctttatcagcagcttggcaacattctgtaaaagcagctttatacctttaagcaaagaaaaggagttccggggcataaaagtaaggatgtcttctggcaatttataataagtattttttcaaaaatgtctcttcattgtcatgaaaagcagtgcatcacacatcaacctctggtctcaccaatcgggggaggtttgggttgtttacttagtgttgcaagaattattttattctctcaggttcttgttttgcacagcagtcagctcattcaccataggtttcacgaagagttgctgcggccgcctcgataatacgactcactatagggtcgacgatatcagatctaggaacccctagtgatggagttggccactccctctctgcgcgctcgctcgctcactgaggccgcccgggcaaagcccgggcgtcgggcgacctttggtcgcccggcctcagtgagcgagcgagcgcgcagagagggagtgg

SEQ ID NO: 915 - DNA, 2285 bp, Artificial Sequence
  source: /note="Description of Artificial Sequence: Synthetic polynucleotide"
cctgcaggcagctgcgcgctcgctcgctcactgaggccgcccgggcaaagcccgggcgtcgggcgacctttggtcgcccggcctcagtgagcgagcgagcgcgcagagagggagtggccaactccatcactaggggttcctagatctgatatcggcgcgcccctgggcgcgcccgagtccaacacccgtgggaatcccatgggcaccatggcccctcgctccaaaaatgctttcgcgtcgcgcagacactgctcggtagtttcggggatcagcgtttgagtaagagcccgcgtctgaaccctccgcgccgccccggccccagtggaaagacgcgcaggcaaaacgcaccacgtgacggagcgtgaccgcgcgccgagcgcgcgccaaggtcgggcaggaagagggcctatttcccatgattccttcatatttgcatatacgatacaaggctgttagagagataattagaattaatttgactgtaaacacaaagatattagtacaaaatacgtgacgtagaaagtaataatttcttgggtagtttgcagttttaaaattatgttttaaaatggactatcatatgcttaccgtaacttgaaagtatttcgatttcttggctttatatatcttgtggaaaggacgaaacaccgcaccagagtaacagtctgaggtttaagagctatgctggaaacagcatagcaagtttaaataaggctagtccgttatcaacttgaaaaagtggcaccgagtcggtgctttttttgcggccgcgctcggcgcgcccatatttgcatgtcgctatgtgttctgggaaatcaccataaacgtgaaatgtctttggatttgggaatcttataagttctgtatgagaccacggtacaccgcaccagagtaacagtctgaggtttaagagctatgctggaaacagcatagcaagtttaaataaggctagtccgttatcaacttgaaaaagtggcaccgagtcggtgctttttttgcggccgctgacggcgcgccctgcagtatttagcatgccccacccatctgcaaggcattctggatagtgtcaaaacagccggaaatcaagtccgtttatctcaaactttagcattttgggaataaatgatatttgctatgctggttaaattagattttagttaaatttcctgctgaagctctagtacgataagtaacttgacctaagtgtaaagttgagatttccttcaggtttatatagcttgtgcgccgcctgggtacaccgcaccagagtaacagtctgaggtttaagagctatgctggaaacagcatagcaagtttaaataaggctagtccgttatcaacttgaaaaagtggcaccgagtcggtgctttttttgcggccgcgctgtttaaaccaacaaaatcagcagctaatgaaggcaagtcagcaggtcactcatcattttccacttcggcaatgcagtgggattattccaacagaggtttttcacagcattccttcagttaactggagatcgaatcttgattttcacagatatacttggcaaggtccgccctgtcatcagcacattcaagcagatctccatggcagcattccgtgtggacttaggtaagatctgtcactaacttggaaacttctgcaaactcagcttagggaaatctctggctcaggcgagctactgcctcagcttagaaagctctttctccaaattattggagactggcacacttaagtccctgttaggcagacgaagccttcccttcatcccgaagttcatcgagctttggcaacaggcaggcagctttatcagcagcttggcaacattctgtaaaagcagctttatacctttaagcaaagaaaaggagttccggggcataaaagtaaggatgtcttctggcaatttataataagtattttttcaaaaatgtctcttcattgtcatgaaaagcagtgcatcacacatcaacctctggtctcaccaatcgggggaggtttgggttgtttacttagtgttgcaagaattattttattctctcaggttcttgttttgcacagcagtcagctcattcaccataggtttcacgaagagttgctgcggccgcctcgataatacgactcactatagggtcgacgatatcagatctaggaacccctagtgatggagttggccactccctctctgcgcgctcgctcgctcactgaggccgggcgaccaaaggtcgcccgacgcccgggctttgcccgggcggcctcagtgagcgagcgagcgcgcagctgcctgcagg

SEQ ID NO: 916 - DNA, 4009 bp, Artificial Sequence
  source: /note="Description of Artificial Sequence: Synthetic polynucleotide"
aagatgacggtttgtcacatggagttggcaggatgtttgattaaaaacataacaggaagaaaaatgccccgctgtgggcggacaaaatagttgggaactgggaggggtggaaatggagtttttaaggattatttagggaagagtgacaaaatagatgggaactgggtgtagcgtcgtaagctaatacgaaaattaaaaatgacaaaatagtttggaactagatttcacttatctggttcggatctcctaggcgatatcagtgatcacggatctcgaccaattgacattattgaagcaactagtatcgattttatcagggttattgtctcagacctgcaggcagctgcgcgctcgctcgctcactgaggccgcccgggcaaagcccgggcgtcgggcgacctttggtcgcccggcctcagtgagcgagcgagcgcgcagagagggagtggccaactccatcactaggggttcctagatctgatatcggcgcgcccctgggcgcgcccgagtccaacacccgtgggaatcccatgggcaccatggcccctcgctccaaaaatgctttcgcgtcgcgcagacactgctcggtagtttcggggatcagcgtttgagtaagagcccgcgtctgaaccctccgcgccgccccggccccagtggaaagacgcgcaggcaaaacgcaccacgtgacggagcgtgaccgcgcgccgagcgcgcgccaaggtcgggcaggaagagggcctatttcccatgattccttcatatttgcatatacgatacaaggctgttagagagataattagaattaatttgactgtaaacacaaagatattagtacaaaatacgtgacgtagaaagtaataatttcttgggtagtttgcagttttaaaattatgttttaaaatggactatcatatgcttaccgtaacttgaaagtatttcgatttcttggctttatatatcttgtggaaaggacgaaacaccgcaccagagtaacagtctgaggtttaagagctatgctggaaacagcatagcaagtttaaataaggctagtccgttatcaacttgaaaaagtggcaccgagtcggtgctttttttgcggccgcgctcggcgcgcccatatttgcatgtcgctatgtgttctgggaaatcaccataaacgtgaaatgtctttggatttgggaatcttataagttctgtatgagaccacggtacaccgcaccagagtaacagtctgaggtttaagagctatgctggaaacagcatagcaagtttaaataaggctagtccgttatcaacttgaaaaagtggcaccgagtcggtgctttttttgcggccgctgacggcgcgccctgcagtatttagcatgccccacccatctgcaaggcattctggatagtgtcaaaacagccggaaatcaagtccgtttatctcaaactttagcattttgggaataaatgatatttgctatgctggttaaattagattttagttaaatttcctgctgaagctctagtacgataagtaacttgacctaagtgtaaagttgagatttccttcaggtttatatagcttgtgcgccgcctgggtacaccgcaccagagtaacagtctgaggtttaagagctatgctggaaacagcatagcaagtttaaataaggctagtccgttatcaacttgaaaaagtggcaccgagtcggtgctttttttgcggccgcgctgtttaaaccaacaaaatcagcagctaatgaaggcaagtcagcaggtcactcatcattttccacttcggcaatgcagtgggattattccaacagaggtttttcacagcattccttcagttaactggagatcgaatcttgattttcacagatatacttggcaaggtccgccctgtcatcagcacattcaagcagatctccatggcagcattccgtgtggacttaggtaagatctgtcactaacttggaaacttctgcaaactcagcttagggaaatctctggctcaggcgagctactgcctcagcttagaaagctctttctccaaattattggagactggcacacttaagtccctgttaggcagacgaagccttcccttcatcccgaagttcatcgagctttggcaacaggcaggcagctttatcagcagcttggcaacattctgtaaaagcagctttatacctttaagcaaagaaaaggagttccggggcataaaagtaaggatgtcttctggcaatttataataagtattttttcaaaaatgtctcttcattgtcatgaaaagcagtgcatcacacatcaacctctggtctcaccaatcgggggaggtttgggttgtttacttagtgttgcaagaattattttattctctcaggttcttgttttgcacagcagtcagctcattcaccataggtttcacgaagagttgctgcggccgcctcgataatacgactcactatagggtcgacgatatcagatctaggaacccctagtgatggagttggccactccctctctgcgcgctcgctcgctcactgaggccgggcgaccaaaggtcgcccgacgcccgggctttgcccgggcggcctcagtgagcgagcgagcgcgcagctgcctgcaggcatgcaagctgtagccaaccactagaactatagctagagtcctgggcgaacaaacgatgctcgccttccagaaaaccgaggatgcgaaccacttcatccggggtcagcaccaccggcaagcgccgcgacggccgaggtcttccgatctcctgaagccagggcagatccgtgcacagcaccttgccgtagaagaacagcaaggccgccaatgcctgacgatgcgtggagaccgaaaccttgcgctcgttcgccagccaggacagaaatgcctcgacttcgctgctgcccaaggttgccgggtgacgcacaccgtggaaacggatgaaggcacgaacccagttgacataagcctgttcggttcgtaaactgtaatgcaagtagcgtatgcgctcacgcaactggtccagaaccttgaccgaacgcagcggtggtaacggcgcagtggcggttttcatggcttgttatgactgtttttttgtacagtctatgcctcgggcatccaagcagcaagcgcgttacgccgtgggtcgatgtttgatgttatggagcagcaacgatgttacgcagcagcaacgatgttacgcagcagggcagtcgccctaaaacaaagttaggtggctcaagtatgggcatcattcgcacatgtaggctcggccctgaccaagtcaaatccatgcgggctgctcttgatcttttcggtcgtgagttcggagacgtagccacctactcccaacatcagccggactccgattacctcgggaacttgctccgtagtaagacattcatcgcgcttgctgccttcgaccaagaagcggttgttggcgctctcgcggcttacgttctgcccaagtttgagcagccgcgtagtgagatctatatctatgatctcgcagtctccggcgagcaccggaggcagggcattgccaccgcgctcatcaatctcctcaagcatgaggccaacgcgcttggtgcttatgtgatctacgtgcaagcagattacggtgacgatcccgcagtggctctctatacaaagttgggcatacgggaagaagtgatgcactttgatatcgacccaagtaccgccacctaacaattcgttcaagccgagatcggcttcccggccgcggagttgttcggtaaattgtcacaacgccgcgaatatagtctttaccatgcccttggccacgcccctctttaatacgacgggcaatttgcacttcagaaaatgaagagtttgctttagccataacaaaagtccagtatgctttttcacagcataactggactgatttcagtttacaactattctgtctagtttaagactttattgtcatagtttagatctattttgttcagtttaagactttattgtccgcccacacccgcttacgc

SEQ ID NO: 917 - DNA, 4009 bp, Artificial Sequence
  source: /note="Description of Artificial Sequence: Synthetic polynucleotide"
aagatgacggtttgtcacatggagttggcaggatgtttgattaaaaacataacaggaagaaaaatgccccgctgtgggcggacaaaatagttgggaactgggaggggtggaaatggagtttttaaggattatttagggaagagtgacaaaatagatgggaactgggtgtagcgtcgtaagctaatacgaaaattaaaaatgacaaaatagtttggaactagatttcacttatctggttcggatctcctaggcgatatcagtgatcacggatctcgaccaattgacattattgaagcaactagtatcgattttatcagggttattgtctcagaccactccctctatgcgcgctcgctcactcactcggccctggagaccaaaggtctccagactgccggcctctggccggcagggccgagtgagtgagcgagcgcgcatagagggagtgggtacctccatcatctaggtttgccagatctgatatcggcgcgcccctgggcgcgcccgagtccaacacccgtgggaatcccatgggcaccatggcccctcgctccaaaaatgctttcgcgtcgcgcagacactgctcggtagtttcggggatcagcgtttgagtaagagcccgcgtctgaaccctccgcgccgccccggccccagtggaaagacgcgcaggcaaaacgcaccacgtgacggagcgtgaccgcgcgccgagcgcgcgccaaggtcgggcaggaagagggcctatttcccatgattccttcatatttgcatatacgatacaaggctgttagagagataattagaattaatttgactgtaaacacaaagatattagtacaaaatacgtgacgtagaaagtaataatttcttgggtagtttgcagttttaaaattatgttttaaaatggactatcatatgcttaccgtaacttgaaagtatttcgatttcttggctttatatatcttgtggaaaggacgaaacaccgcaccagagtaacagtctgaggtttaagagctatgctggaaacagcatagcaagtttaaataaggctagtccgttatcaacttgaaaaagtggcaccgagtcggtgctttttttgcggccgcgctcggcgcgcccatatttgcatgtcgctatgtgttctgggaaatcaccataaacgtgaaatgtctttggatttgggaatcttataagttctgtatgagaccacggtacaccgcaccagagtaacagtctgaggtttaagagctatgctggaaacagcatagcaagtttaaataaggctagtccgttatcaacttgaaaaagtggcaccgagtcggtgctttttttgcggccgctgacggcgcgccctgcagtatttagcatgccccacccatctgcaaggcattctggatagtgtcaaaacagccggaaatcaagtccgtttatctcaaactttagcattttgggaataaatgatatttgctatgctggttaaattagattttagttaaatttcctgctgaagctctagtacgataagtaacttgacctaagtgtaaagttgagatttccttcaggtttatatagcttgtgcgccgcctgggtacaccgcaccagagtaacagtctgaggtttaagagctatgctggaaacagcatagcaagtttaaataaggctagtccgttatcaacttgaaaaagtggcaccgagtcggtgctttttttgcggccgcgctgtttaaaccaacaaaatcagcagctaatgaaggcaagtcagcaggtcactcatcattttccacttcggcaatgcagtgggattattccaacagaggtttttcacagcattccttcagttaactggagatcgaatcttgattttcacagatatacttggcaaggtccgccctgtcatcagcacattcaagcagatctccatggcagcattccgtgtggacttaggtaagatctgtcactaacttggaaacttctgcaaactcagcttagggaaatctctggctcaggcgagctactgcctcagcttagaaagctctttctccaaattattggagactggcacacttaagtccctgttaggcagacgaagccttcccttcatcccgaagttcatcgagctttggcaacaggcaggcagctttatcagcagcttggcaacattctgtaaaagcagctttatacctttaagcaaagaaaaggagttccggggcataaaagtaaggatgtcttctggcaatttataataagtattttttcaaaaatgtctcttcattgtcatgaaaagcagtgcatcacacatcaacctctggtctcaccaatcgggggaggtttgggttgtttacttagtgttgcaagaattattttattctctcaggttcttgttttgcacagcagtcagctcattcaccataggtttcacgaagagttgctgcggccgcctcgataatacgactcactatagggtcgacgatatcagatctaggaacccctagtgatggagttggccactccctctctgcgcgctcgctcgctcactgaggccgcccgggcaaagcccgggcgtcgggcgacctttggtcgcccggcctcagtgagcgagcgagcgcgcagagagggagtggcatgcaagctgtagccaaccactagaactatagctagagtcctgggcgaacaaacgatgctcgccttccagaaaaccgaggatgcgaaccacttcatccggggtcagcaccaccggcaagcgccgcgacggccgaggtcttccgatctcctgaagccagggcagatccgtgcacagcaccttgccgtagaagaacagcaaggccgccaatgcctgacgatgcgtggagaccgaaaccttgcgctcgttcgccagccaggacagaaatgcctcgacttcgctgctgcccaaggttgccgggtgacgcacaccgtggaaacggatgaaggcacgaacccagttgacataagcctgttcggttcgtaaactgtaatgcaagtagcgtatgcgctcacgcaactggtccagaaccttgaccgaacgcagcggtggtaacggcgcagtggcggttttcatggcttgttatgactgtttttttgtacagtctatgcctcgggcatccaagcagcaagcgcgttacgccgtgggtcgatgtttgatgttatggagcagcaacgatgttacgcagcagcaacgatgttacgcagcagggcagtcgccctaaaacaaagttaggtggctcaagtatgggcatcattcgcacatgtaggctcggccctgaccaagtcaaatccatgcgggctgctcttgatcttttcggtcgtgagttcggagacgtagccacctactcccaacatcagccggactccgattacctcgggaacttgctccgtagtaagacattcatcgcgcttgctgccttcgaccaagaagcggttgttggcgctctcgcggcttacgttctgcccaagtttgagcagccgcgtagtgagatctatatctatgatctcgcagtctccggcgagcaccggaggcagggcattgccaccgcgctcatcaatctcctcaagcatgaggccaacgcgcttggtgcttatgtgatctacgtgcaagcagattacggtgacgatcccgcagtggctctctatacaaagttgggcatacgggaagaagtgatgcactttgatatcgacccaagtaccgccacctaacaattcgttcaagccgagatcggcttcccggccgcggagttgttcggtaaattgtcacaacgccgcgaatatagtctttaccatgcccttggccacgcccctctttaatacgacgggcaatttgcacttcagaaaatgaagagtttgctttagccataacaaaagtccagtatgctttttcacagcataactggactgatttcagtttacaactattctgtctagtttaagactttattgtcatagtttagatctattttgttcagtttaagactttattgtccgcccacacccgcttacgc

SEQ ID NO: 918 - DNA, 2285 bp, Artificial Sequence
  source: /note="Description of Artificial Sequence: Synthetic polynucleotide"
ccactccctctatgcgcgctcgctcactcactcggccctggagaccaaaggtctccagactgccggcctctggccggcagggccgagtgagtgagcgagcgcgcatagagggagtgggtacctccatcatctaggtttgccagatctgatatcggcgcgcccctgggcgcgcccgagtccaacacccgtgggaatcccatgggcaccatggcccctcgctccaaaaatgctttcgcgtcgcgcagacactgctcggtagtttcggggatcagcgtttgagtaagagcccgcgtctgaaccctccgcgccgccccggccccagtggaaagacgcgcaggcaaaacgcaccacgtgacggagcgtgaccgcgcgccgagcgcgcgccaaggtcgggcaggaagagggcctatttcccatgattccttcatatttgcatatacgatacaaggctgttagagagataattagaattaatttgactgtaaacacaaagatattagtacaaaatacgtgacgtagaaagtaataatttcttgggtagtttgcagttttaaaattatgttttaaaatggactatcatatgcttaccgtaacttgaaagtatttcgatttcttggctttatatatcttgtggaaaggacgaaacaccgcaccagagtaacagtctgacgtttaagagctatgctggaaacagcatagcaagtttaaataaggctagtccgttatcaacttgaaaaagtggcaccgagtcggtgctttttttgcggccgcgctcggcgcgcccatatttgcatgtcgctatgtgttctgggaaatcaccataaacgtgaaatgtctttggatttgggaatcttataagttctgtatgagaccacggtacaccgcaccagagtaacagtctgacgtttaagagctatgctggaaacagcatagcaagtttaaataaggctagtccgttatcaacttgaaaaagtggcaccgagtcggtgctttttttgcggccgctgacggcgcgccctgcagtatttagcatgccccacccatctgcaaggcattctggatagtgtcaaaacagccggaaatcaagtccgtttatctcaaactttagcattttgggaataaatgatatttgctatgctggttaaattagattttagttaaatttcctgctgaagctctagtacgataagtaacttgacctaagtgtaaagttgagatttccttcaggtttatatagcttgtgcgccgcctgggtacaccgcaccagagtaacagtctgacgtttaagagctatgctggaaacagcatagcaagtttaaataaggctagtccgttatcaacttgaaaaagtggcaccgagtcggtgctttttttgcggccgcgctgtttaaaccaacaaaatcagcagctaatgaaggcaagtcagcaggtcactcatcattttccacttcggcaatgcagtgggattattccaacagaggtttttcacagcattccttcagttaactggagatcgaatcttgattttcacagatatacttggcaaggtccgccctgtcatcagcacattcaagcagatctccatggcagcattccgtgtggacttaggtaagatctgtcactaacttggaaacttctgcaaactcagcttagggaaatctctggctcaggcgagctactgcctcagcttagaaagctctttctccaaattattggagactggcacacttaagtccctgttaggcagacgaagccttcccttcatcccgaagttcatcgagctttggcaacaggcaggcagctttatcagcagcttggcaacattctgtaaaagcagctttatacctttaagcaaagaaaaggagttccggggcataaaagtaaggatgtcttctggcaatttataataagtattttttcaaaaatgtctcttcattgtcatgaaaagcagtgcatcacacatcaacctctggtctcaccaatcgggggaggtttgggttgtttacttagtgttgcaagaattattttattctctcaggttcttgttttgcacagcagtcagctcattcaccataggtttcacgaagagttgctgcggccgcctcgataatacgactcactatagggtcgacgatatcagatctaggaacccctagtgatggagttggccactccctctctgcgcgctcgctcgctcactgaggccgcccgggcaaagcccgggcgtcgggcgacctttggtcgcccggcctcagtgagcgagcgagcgcgcagagagggagtgg

SEQ ID NO: 919 - DNA, 2285 bp, Artificial Sequence
  source: /note="Description of Artificial Sequence: Synthetic polynucleotide"
cctgcaggcagctgcgcgctcgctcgctcactgaggccgcccgggcaaagcccgggcgtcgggcgacctttggtcgcccggcctcagtgagcgagcgagcgcgcagagagggagtggccaactccatcactaggggttcctagatctgatatcggcgcgcccctgggcgcgcccgagtccaacacccgtgggaatcccatgggcaccatggcccctcgctccaaaaatgctttcgcgtcgcgcagacactgctcggtagtttcggggatcagcgtttgagtaagagcccgcgtctgaaccctccgcgccgccccggccccagtggaaagacgcgcaggcaaaacgcaccacgtgacggagcgtgaccgcgcgccgagcgcgcgccaaggtcgggcaggaagagggcctatttcccatgattccttcatatttgcatatacgatacaaggctgttagagagataattagaattaatttgactgtaaacacaaagatattagtacaaaatacgtgacgtagaaagtaataatttcttgggtagtttgcagttttaaaattatgttttaaaatggactatcatatgcttaccgtaacttgaaagtatttcgatttcttggctttatatatcttgtggaaaggacgaaacaccgcaccagagtaacagtctgacgtttaagagctatgctggaaacagcatagcaagtttaaataaggctagtccgttatcaacttgaaaaagtggcaccgagtcggtgctttttttgcggccgcgctcggcgcgcccatatttgcatgtcgctatgtgttctgggaaatcaccataaacgtgaaatgtctttggatttgggaatcttataagttctgtatgagaccacggtacaccgcaccagagtaacagtctgacgtttaagagctatgctggaaacagcatagcaagtttaaataaggctagtccgttatcaacttgaaaaagtggcaccgagtcggtgctttttttgcggccgctgacggcgcgccctgcagtatttagcatgccccacccatctgcaaggcattctggatagtgtcaaaacagccggaaatcaagtccgtttatctcaaactttagcattttgggaataaatgatatttgctatgctggttaaattagattttagttaaatttcctgctgaagctctagtacgataagtaacttgacctaagtgtaaagttgagatttccttcaggtttatatagcttgtgcgccgcctgggtacaccgcaccagagtaacagtctgacgtttaagagctatgctggaaacagcatagcaagtttaaataaggctagtccgttatcaacttgaaaaagtggcaccgagtcggtgctttttttgcggccgcgctgtttaaaccaacaaaatcagcagctaatgaaggcaagtcagcaggtcactcatcattttccacttcggcaatgcagtgggattattccaacagaggtttttcacagcattccttcagttaactggagatcgaatcttgattttcacagatatacttggcaaggtccgccctgtcatcagcacattcaagcagatctccatggcagcattccgtgtggacttaggtaagatctgtcactaacttggaaacttctgcaaactcagcttagggaaatctctggctcaggcgagctactgcctcagcttagaaagctctttctccaaattattggagactggcacacttaagtccctgttaggcagacgaagccttcccttcatcccgaagttcatcgagctttggcaacaggcaggcagctttatcagcagcttggcaacattctgtaaaagcagctttatacctttaagcaaagaaaaggagttccggggcataaaagtaaggatgtcttctggcaatttataataagtattttttcaaaaatgtctcttcattgtcatgaaaagcagtgcatcacacatcaacctctggtctcaccaatcgggggaggtttgggttgtttacttagtgttgcaagaattattttattctctcaggttcttgttttgcacagcagtcagctcattcaccataggtttcacgaagagttgctgcggccgcctcgataatacgactcactatagggtcgacgatatcagatctaggaacccctagtgatggagttggccactccctctctgcgcgctcgctcgctcactgaggccgggcgaccaaaggtcgcccgacgcccgggctttgcccgggcggcctcagtgagcgagcgagcgcgcagctgcctgcagg

SEQ ID NO: 920 - DNA, 4009 bp, Artificial Sequence
  source: /note="Description of Artificial Sequence: Synthetic polynucleotide"
aagatgacggtttgtcacatggagttggcaggatgtttgattaaaaacataacaggaagaaaaatgccccgctgtgggcggacaaaatagttgggaactgggaggggtggaaatggagtttttaaggattatttagggaagagtgacaaaatagatgggaactgggtgtagcgtcgtaagctaatacgaaaattaaaaatgacaaaatagtttggaactagatttcacttatctggttcggatctcctaggcgatatcagtgatcacggatctcgaccaattgacattattgaagcaactagtatcgattttatcagggttattgtctcagacctgcaggcagctgcgcgctcgctcgctcactgaggccgcccgggcaaagcccgggcgtcgggcgacctttggtcgcccggcctcagtgagcgagcgagcgcgcagagagggagtggccaactccatcactaggggttcctagatctgatatcggcgcgcccctgggcgcgcccgagtccaacacccgtgggaatcccatgggcaccatggcccctcgctccaaaaatgctttcgcgtcgcgcagacactgctcggtagtttcggggatcagcgtttgagtaagagcccgcgtctgaaccctccgcgccgccccggccccagtggaaagacgcgcaggcaaaacgcaccacgtgacggagcgtgaccgcgcgccgagcgcgcgccaaggtcgggcaggaagagggcctatttcccatgattccttcatatttgcatatacgatacaaggctgttagagagataattagaattaatttgactgtaaacacaaagatattagtacaaaatacgtgacgtagaaagtaataatttcttgggtagtttgcagttttaaaattatgttttaaaatggactatcatatgcttaccgtaacttgaaagtatttcgatttcttggctttatatatcttgtggaaaggacgaaacaccgcaccagagtaacagtctgacgtttaagagctatgctggaaacagcatagcaagtttaaataaggctagtccgttatcaacttgaaaaagtggcaccgagtcggtgctttttttgcggccgcgctcggcgcgcccatatttgcatgtcgctatgtgttctgggaaatcaccataaacgtgaaatgtctttggatttgggaatcttataagttctgtatgagaccacggtacaccgcaccagagtaacagtctgacgtttaagagctatgctggaaacagcatagcaagtttaaataaggctagtccgttatcaacttgaaaaagtggcaccgagtcggtgctttttttgcggccgctgacggcgcgccctgcagtatttagcatgccccacccatctgcaaggcattctggatagtgtcaaaacagccggaaatcaagtccgtttatctcaaactttagcattttgggaataaatgatatttgctatgctggttaaattagattttagttaaatttcctgctgaagctctagtacgataagtaacttgacctaagtgtaaagttgagatttccttcaggtttatatagcttgtgcgccgcctgggtacaccgcaccagagtaacagtctgacgtttaagagctatgctggaaacagcatagcaagtttaaataaggctagtccgttatcaacttgaaaaagtggcaccgagtcggtgctttttttgcggccgcgctgtttaaaccaacaaaatcagcagctaatgaaggcaagtcagcaggtcactcatcattttccacttcggcaatgcagtgggattattccaacagaggtttttcacagcattccttcagttaactggagatcgaatcttgattttcacagatatacttggcaaggtccgccctgtcatcagcacattcaagcagatctccatggcagcattccgtgtggacttaggtaagatctgtcactaacttggaaacttctgcaaactcagcttagggaaatctctggctcaggcgagctactgcctcagcttagaaagctctttctccaaattattggagactggcacacttaagtccctgttaggcagacgaagccttcccttcatcccgaagttcatcgagctttggcaacaggcaggcagctttatcagcagcttggcaacattctgtaaaagcagctttatacctttaagcaaagaaaaggagttccggggcataaaagtaaggatgtcttctggcaatttataataagtattttttcaaaaatgtctcttcattgtcatgaaaagcagtgcatcacacatcaacctctggtctcaccaatcgggggaggtttgggttgtttacttagtgttgcaagaattattttattctctcaggttcttgttttgcacagcagtcagctcattcaccataggtttcacgaagagttgctgcggccgcctcgataatacgactcactatagggtcgacgatatcagatctaggaacccctagtgatggagttggccactccctctctgcgcgctcgctcgctcactgaggccgggcgaccaaaggtcgcccgacgcccgggctttgcccgggcggcctcagtgagcgagcgagcgcgcagctgcctgcaggcatgcaagctgtagccaaccactagaactatagctagagtcctgggcgaacaaacgatgctcgccttccagaaaaccgaggatgcgaaccacttcatccggggtcagcaccaccggcaagcgccgcgacggccgaggtcttccgatctcctgaagccagggcagatccgtgcacagcaccttgccgtagaagaacagcaaggccgccaatgcctgacgatgcgtggagaccgaaaccttgcgctcgttcgccagccaggacagaaatgcctcgacttcgctgctgcccaaggttgccgggtgacgcacaccgtggaaacggatgaaggcacgaacccagttgacataagcctgttcggttcgtaaactgtaatgcaagtagcgtatgcgctcacgcaactggtccagaaccttgaccgaacgcagcggtggtaacggcgcagtggcggttttcatggcttgttatgactgtttttttgtacagtctatgcctcgggcatccaagcagcaagcgcgttacgccgtgggtcgatgtttgatgttatggagcagcaacgatgttacgcagcagcaacgatgttacgcagcagggcagtcgccctaaaacaaagttaggtggctcaagtatgggcatcattcgcacatgtaggctcggccctgaccaagtcaaatccatgcgggctgctcttgatcttttcggtcgtgagttcggagacgtagccacctactcccaacatcagccggactccgattacctcgggaacttgctccgtagtaagacattcatcgcgcttgctgccttcgaccaagaagcggttgttggcgctctcgcggcttacgttctgcccaagtttgagcagccgcgtagtgagatctatatctatgatctcgcagtctccggcgagcaccggaggcagggcattgccaccgcgctcatcaatctcctcaagcatgaggccaacgcgcttggtgcttatgtgatctacgtgcaagcagattacggtgacgatcccgcagtggctctctatacaaagttgggcatacgggaagaagtgatgcactttgatatcgacccaagtaccgccacctaacaattcgttcaagccgagatcggcttcccggccgcggagttgttcggtaaattgtcacaacgccgcgaatatagtctttaccatgcccttggccacgcccctctttaatacgacgggcaatttgcacttcagaaaatgaagagtttgctttagccataacaaaagtccagtatgctttttcacagcataactggactgatttcagtttacaactattctgtctagtttaagactttattgtcatagtttagatctattttgttcagtttaagactttattgtccgcccacacccgcttacgc

SEQ ID NO: 921 - DNA, 4009 bp, Artificial Sequence
  source: /note="Description of Artificial Sequence: Synthetic polynucleotide"
aagatgacggtttgtcacatggagttggcaggatgtttgattaaaaacataacaggaagaaaaatgccccgctgtgggcggacaaaatagttgggaactgggaggggtggaaatggagtttttaaggattatttagggaagagtgacaaaatagatgggaactgggtgtagcgtcgtaagctaatacgaaaattaaaaatgacaaaatagtttggaactagatttcacttatctggttcggatctcctaggcgatatcagtgatcacggatctcgaccaattgacattattgaagcaactagtatcgattttatcagggttattgtctcagaccactccctctatgcgcgctcgctcactcactcggccctggagaccaaaggtctccagactgccggcctctggccggcagggccgagtgagtgagcgagcgcgcatagagggagtgggtacctccatcatctaggtttgccagatctgatatcggcgcgcccctgggcgcgcccgagtccaacacccgtgggaatcccatgggcaccatggcccctcgctccaaaaatgctttcgcgtcgcgcagacactgctcggtagtttcggggatcagcgtttgagtaagagcccgcgtctgaaccctccgcgccgccccggccccagtggaaagacgcgcaggcaaaacgcaccacgtgacggagcgtgaccgcgcgccgagcgcgcgccaaggtcgggcaggaagagggcctatttcccatgattccttcatatttgcatatacgatacaaggctgttagagagataattagaattaatttgactgtaaacacaaagatattagtacaaaatacgtgacgtagaaagtaataatttcttgggtagtttgcagttttaaaattatgttttaaaatggactatcatatgcttaccgtaacttgaaagtatttcgatttcttggctttatatatcttgtggaaaggacgaaacaccgcaccagagtaacagtctgacgtttaagagctatgctggaaacagcatagcaagtttaaataaggctagtccgttatcaacttgaaaaagtggcaccgagtcggtgctttttttgcggccgcgctcggcgcgcccatatttgcatgtcgctatgtgttctgggaaatcaccataaacgtgaaatgtctttggatttgggaatcttataagttctgtatgagaccacggtacaccgcaccagagtaacagtctgacgtttaagagctatgctggaaacagcatagcaagtttaaataaggctagtccgttatcaacttgaaaaagtggcaccgagtcggtgctttttttgcggccgctgacggcgcgccctgcagtatttagcatgccccacccatctgcaaggcattctggatagtgtcaaaacagccggaaatcaagtccgtttatctcaaactttagcattttgggaataaatgatatttgctatgctggttaaattagattttagttaaatttcctgctgaagctctagtacgataagtaacttgacctaagtgtaaagttgagatttccttcaggtttatatagcttgtgcgccgcctgggtacaccgcaccagagtaacagtctgacgtttaagagctatgctggaaacagcatagcaagtttaaataaggctagtccgttatcaacttgaaaaagtggcaccgagtcggtgctttttttgcggccgcgctgtttaaaccaacaaaatcagcagctaatgaaggcaagtcagcaggtcactcatcattttccacttcggcaatgcagtgggattattccaacagaggtttttcacagcattccttcagttaactggagatcgaatcttgattttcacagatatacttggcaaggtccgccctgtcatcagcacattcaagcagatctccatggcagcattccgtgtggacttaggtaagatctgtcactaacttggaaacttctgcaaactcagcttagggaaatctctggctcaggcgagctactgcctcagcttagaaagctctttctccaaattattggagactggcacacttaagtccctgttaggcagacgaagccttcccttcatcccgaagttcatcgagctttggcaacaggcaggcagctttatcagcagcttggcaacattctgtaaaagcagctttatacctttaagcaaagaaaaggagttccggggcataaaagtaaggatgtcttctggcaatttataataagtattttttcaaaaatgtctcttcattgtcatgaaaagcagtgcatcacacatcaacctctggtctcaccaatcgggggaggtttgggttgtttacttagtgttgcaagaattattttattctctcaggttcttgttttgcacagcagtcagctcattcaccataggtttcacgaagagttgctgcggccgcctcgataatacgactcactatagggtcgacgatatcagatctaggaacccctagtgatggagttggccactccctctctgcgcgctcgctcgctcactgaggccgcccgggcaaagcccgggcgtcgggcgacctttggtcgcccggcctcagtgagcgagcgagcgcgcagagagggagtggcatgcaagctgtagccaaccactagaactatagctagagtcctgggcgaacaaacgatgctcgccttccagaaaaccgaggatgcgaaccacttcatccggggtcagcaccaccggcaagcgccgcgacggccgaggtcttccgatctcctgaagccagggcagatccgtgcacagcaccttgccgtagaagaacagcaaggccgccaatgcctgacgatgcgtggagaccgaaaccttgcgctcgttcgccagccaggacagaaatgcctcgacttcgctgctgcccaaggttgccgggtgacgcacaccgtggaaacggatgaaggcacgaacccagttgacataagcctgttcggttcgtaaactgtaatgcaagtagcgtatgcgctcacgcaactggtccagaaccttgaccgaacgcagcggtggtaacggcgcagtggcggttttcatggcttgttatgactgtttttttgtacagtctatgcctcgggcatccaagcagcaagcgcgttacgccgtgggtcgatgtttgatgttatggagcagcaacgatgttacgcagcagcaacgatgttacgcagcagggcagtcgccctaaaacaaagttaggtggctcaagtatgggcatcattcgcacatgtaggctcggccctgaccaagtcaaatccatgcgggctgctcttgatcttttcggtcgtgagttcggagacgtagccacctactcccaacatcagccggactccgattacctcgggaacttgctccgtagtaagacattcatcgcgcttgctgccttcgaccaagaagcggttgttggcgctctcgcggcttacgttctgcccaagtttgagcagccgcgtagtgagatctatatctatgatctcgcagtctccggcgagcaccggaggcagggcattgccaccgcgctcatcaatctcctcaagcatgaggccaacgcgcttggtgcttatgtgatctacgtgcaagcagattacggtgacgatcccgcagtggctctctatacaaagttgggcatacgggaagaagtgatgcactttgatatcgacccaagtaccgccacctaacaattcgttcaagccgagatcggcttcccggccgcggagttgttcggtaaattgtcacaacgccgcgaatatagtctttaccatgcccttggccacgcccctctttaatacgacgggcaatttgcacttcagaaaatgaagagtttgctttagccataacaaaagtccagtatgctttttcacagcataactggactgatttcagtttacaactattctgtctagtttaagactttattgtcatagtttagatctattttgttcagtttaagactttattgtccgcccacacccgcttacgc

SEQ ID NO: 922 - DNA, 472 bp, Artificial Sequence
  source: /note="Description of Artificial Sequence: Synthetic polynucleotide"
cgagtccaacacccgtgggaatcccatgggcaccatggcccctcgctccaaaaatgctttcgcgtcgcgcagacactgctcggtagtttcggggatcagcgtttgagtaagagcccgcgtctgaaccctccgcgccgccccggccccagtggaaagacgcgcaggcaaaacgcaccacgtgacggagcgtgaccgcgcgccgagcgcgcgccaaggtcgggcaggaagagggcctatttcccatgattccttcatatttgcatatacgatacaaggctgttagagagataattagaattaatttgactgtaaacacaaagatattagtacaaaatacgtgacgtagaaagtaataatttcttgggtagtttgcagttttaaaattatgttttaaaatggactatcatatgcttaccgtaacttgaaagtatttcgatttcttggctttatatatcttgtggaaaggacgaaa

SEQ ID NO: 923 - DNA, 108 bp, Artificial Sequence
  source: /note="Description of Artificial Sequence: Synthetic polynucleotide"
gctcggcgcgcccatatttgcatgtcgctatgtgttctgggaaatcaccataaacgtgaaatgtctttggatttgggaatcttataagttctgtatgagaccacggta

SEQ ID NO: 924 - DNA, 251 bp, Artificial Sequence
  source: /note="Description of Artificial Sequence: Synthetic polynucleotide"
tgacggcgcgccctgcagtatttagcatgccccacccatctgcaaggcattctggatagtgtcaaaacagccggaaatcaagtccgtttatctcaaactttagcattttgggaataaatgatatttgctatgctggttaaattagattttagttaaatttcctgctgaagctctagtacgataagtaacttgacctaagtgtaaagttgagatttccttcaggtttatatagcttgtgcgccgcctgggta

SEQ ID NO: 925 - DNA, 251 bp, Artificial Sequence; identical to SEQ ID NO: 924
  source: /note="Description of Artificial Sequence: Synthetic polynucleotide"

SEQ ID NO: 926 - DNA, 26 bp, Artificial Sequence
  source: /note="Description of Artificial Sequence: Synthetic primer"
caccgaaatgatgagtgaagttatat

SEQ ID NO: 927 - DNA, 26 bp, Artificial Sequence
  source: /note="Description of Artificial Sequence: Synthetic primer"
aaacatataacttcactcatcatttc

SEQ ID NO: 928 - DNA, 25 bp, Artificial Sequence
  source: /note="Description of Artificial Sequence: Synthetic primer"
caccggtttgttcaaaagcgtggct

SEQ ID NO: 929 - DNA, 24 bp, Artificial Sequence
  source: /note="Description of Artificial Sequence: Synthetic primer"
aaacagccacgcttttgaacaaac

SEQ ID NO: 930 - DNA, 45 bp, Artificial Sequence
  source: /note="Description of Artificial Sequence: Synthetic primer"
gaattgtaatacgactcactataggaatgatgagtgaagttatat

SEQ ID NO: 931 - DNA, 45 bp, Artificial Sequence
  source: /note="Description of Artificial Sequence: Synthetic primer"
gaattgtaatacgactcactatagggtttgttcaaaagcgtggct

SEQ ID NO: 932 - DNA, 22 bp, Artificial Sequence
  source: /note="Description of Artificial Sequence: Synthetic primer"
aaaagcaccgactcggtgccac

SEQ ID NO: 933 - DNA, 24 bp, Artificial Sequence
  source: /note="Description of Artificial Sequence: Synthetic primer"
caccggacacaatgtaggaagcct

SEQ ID NO: 934 - DNA, 24 bp, Artificial Sequence
  source: /note="Description of Artificial Sequence: Synthetic primer"
aaacaggcttcctacattgtgtcc

SEQ ID NO: 935 - DNA, 40 bp, Artificial Sequence
  source: /note="Description of Artificial Sequence: Synthetic primer"
gaattgtaatacgactcactggacacaatgtaggaagcct

SEQ ID NO: 936 - DNA, 22 bp, Artificial Sequence
  source: /note="Description of Artificial Sequence: Synthetic primer"
aaaagcaccgactcggtgccac

SEQ ID NO: 937 - DNA, 25 bp, Artificial Sequence
  source: /note="Description of Artificial Sequence: Synthetic primer"
ggattgactgaaatgatggccaagg

SEQ ID NO: 938 - DNA, 24 bp, Artificial Sequence
  source: /note="Description of Artificial Sequence: Synthetic primer"
ctgccacgattactctgcttccag

SEQ ID NO: 939 - DNA, 20 bp, Artificial Sequence
  source: /note="Description of Artificial Sequence: Synthetic primer"
agcaggcagagaaggtggta

SEQ ID NO: 940 - DNA, 22 bp, Artificial Sequence
  source: /note="Description of Artificial Sequence: Synthetic primer"
gggcgtatctcttcatagcctt

SEQ ID NO: 941 - DNA, 20 bp, Artificial Sequence
  source: /note="Description of Artificial Sequence: Synthetic primer"
gcgtgtgtgtttgtttaggg

SEQ ID NO: 942 - DNA, 24 bp, Artificial Sequence
  source: /note="Description of Artificial Sequence: Synthetic primer"
caccgagagtaacagtctgactgg

SEQ ID NO: 943 - DNA, 25 bp, Artificial Sequence
  source: /note="Description of Artificial Sequence: Synthetic primer"
aaacgtcagactgttactctagtgc

SEQ ID NO: 944 - DNA, 25 bp, Artificial Sequence
  source: /note="Description of Artificial Sequence: Synthetic primer"
caccgcactagagtaacagtctgac

SEQ ID NO: 945 - DNA, 24 bp, Artificial Sequence
  source: /note="Description of Artificial Sequence: Synthetic primer"
aaacccagtcagactgttactctc

SEQ ID NO: 946 - DNA, 141 bp, Adeno associated virus
aggaacccctagtgatggagttggccactccctctctgcgcgctcgctcgctcactgaggccgcccgggcaaagcccgggcgtcgggcgacctttggtcgcccggcctcagtgagcgagcgagcgcgcagagagggagtgg

SEQ ID NO: 947 - DNA, 20 bp, Homo sapiens
cagagtaacagtctgagtag

SEQ ID NO: 948 - DNA, 22 bp, Artificial Sequence
  source: /note="Description of Artificial Sequence: Synthetic primer"
gtatgttgtgtggaattgtgag

SEQ ID NO: 949 - protein, 11 aa, Homo sapiens
MLWWEEVEDCY

SEQ ID NO: 950 - protein, 7 aa, Artificial Sequence
  source: /note="Description of Artificial Sequence: Synthetic peptide"
MSEVSSD

SEQ ID NO: 951 - protein, 16 aa, Artificial Sequence
  source: /note="Description of Artificial Sequence: Synthetic peptide"
MTEIILLIFFPAYFLN

SEQ ID NO: 952 - protein, 13 aa, Artificial Sequence
  source: /note="Description of Artificial Sequence: Synthetic peptide"
MSARKLRNLSYKK

SEQ ID NO: 953 - protein, 10 aa, Artificial Sequence
  source: /note="Description of Artificial Sequence: Synthetic peptide"
MLHRKTYHVK

SEQ ID NO: 954 - DNA, 26 bp, Artificial Sequence
  source: /note="Description of Artificial Sequence: Synthetic oligonucleotide"
ctgccagtcagactgttactctagtg

SEQ ID NO: 955 - DNA, 28 bp, Artificial Sequence
  source: /note="Description of Artificial Sequence: Synthetic oligonucleotide"
ctttactagtagtttgtcttccatacct

SEQ ID NO: 956 - DNA, 26 bp, Mus musculus
cactagagtaacagtctgactggcag

SEQ ID NO: 957 - DNA, 28 bp, Mus musculus
aggtatggaagacaaactactagtaaag

SEQ ID NO: 958 - DNA, 34 bp, Artificial Sequence
  source: /note="Description of Artificial Sequence: Synthetic oligonucleotide"
aacactagctgccagtcagactgttactctagtg

SEQ ID NO: 959 - DNA, 34 bp, Mus musculus
cactagagtaacagtctgactggcagctagtgtt

SEQ ID NO: 960 - DNA, 50 bp, Mus musculus
ctttctttcaaaaacactagctgccagtcagactgttactctagtgacac

SEQ ID NO: 961 - DNA, 51 bp, Mus musculus
ctttctttcaaaaacactagctgccagtcaagactgttactctagtgacac

SEQ ID NO: 962 - DNA, 14 bp, Mus musculus
ctttctagtgacac

SEQ ID NO: 963 - DNA, 11 bp, Mus musculus
ctttctttcac

SEQ ID NO: 964 - DNA, 18 bp, Mus musculus
ctttctttctagtgacac

SEQ ID NO: 965 - DNA, 44 bp, Mus musculus
ctttctttcaaaaacactagctgccactgttactctagtgacac

SEQ ID NO: 966 - DNA, 46 bp, Mus musculus
ctttctttcaaaaacactagctgccagactgttactctagtgacac

SEQ ID NO: 967 - DNA, 233 bp, Mus musculus
ctgccagtcagactgttactctagtgacacaatctgtggttactaaggaaactgtcatctccaaactagaaatgccatcttctttgctgttggaggtacctgcactggcagacttcaaccgagcttggacagaacttacagactggctgtctctgcttgatcgagttataaaatcacagagagtgatggtgggtgatctggaagacatcaatgaaatgatcatcaaacagaag

SEQ ID NO: 968 - DNA, 233 bp, Homo sapiens
ctcctactcagactgttactctggtgacacaacctgtggttactaaggaaactgccatctccaaactagaaatgccatcttccttgatgttggaggtacctgctctggcagatttcaaccgggcttggacagaacttaccgactggctttctctgcttgatcaagttataaaatcacagagggtgatggtgggtgaccttgaggatatcaacgagatgatcatcaagcagaag

SEQ ID NO: 969 - DNA, 44 bp, Homo sapiens
ttttagctcctactcagactgttactctggtgacacaacctgtg

SEQ ID NO: 970 - DNA, 45 bp, Homo sapiens
ttttagctcctactcaagactgttactctggtgacacaacctgtg

SEQ ID NO: 971 - DNA, 45 bp, Homo sapiens
ttttagctcctactccagactgttactctggtgacacaacctgtg

SEQ ID NO: 972 - DNA, 42 bp, Homo sapiens
ttttagctcctacagactgttactctggtgacacaacctgtg

SEQ ID NO: 973 - DNA, 43 bp, Homo sapiens
ttttagctcctactagactgttactctggtgacacaacctgtg

SEQ ID NO: 974 - DNA, 42 bp, Homo sapiens
ttttagctcctactgactgttactctggtgacacaacctgtg

SEQ ID NO: 975 - DNA, 41 bp, Homo sapiens
ttttagctcctaagactgttactctggtgacacaacctgtg

SEQ ID NO: 976 - DNA, 40 bp, Homo sapiens
ttttagctcccagactgttactctggtgacacaacctgtg

SEQ ID NO: 977 - DNA, 42 bp, Homo sapiens; identical to SEQ ID NO: 972

SEQ ID NO: 978 - DNA, 32 bp, Homo sapiens
ctcagactgttactctggtgacacaacctgtg

SEQ ID NO: 979 - DNA, 36 bp, Mus musculus
acactagctgccagtcagactgttactctagtgaca

SEQ ID NO: 980 - DNA, 37 bp, Mus musculus
acactagctgccagtcaagactgttactctagtgaca

SEQ ID NO: 981 - DNA, 36 bp, Mus musculus
acactagctgccagtcatactgttactctagtgaca

SEQ ID NO: 982 - DNA, 38 bp, Mus musculus
acactagctgccagtcatagactgttactctagtgaca

SEQ ID NO: 983 - DNA, 36 bp, Mus musculus
acactagctgccagtcagacttttactctagtgaca

SEQ ID NO: 984 - DNA, 38 bp, Mus musculus
acactagctgccagtcaaagactgttactctagtgaca

SEQ ID NO: 985 - DNA, 34 bp, Mus musculus
acactagctgccagtcactgttactctagtgaca

SEQ ID NO: 986 - DNA, 38 bp, Mus musculus
acactagctgccagtcacagactgttactctagtgaca

SEQ ID NO: 987 - DNA, 35 bp, Mus musculus
acactagctgccagtcgactgttactctagtgaca

SEQ ID NO: 988 - DNA, 32 bp, Mus musculus
acactagctgccagtctgttactctagtgaca

SEQ ID NO: 989 - DNA, 30 bp, Mus musculus
acactagctgagactgttactctagtgaca

SEQ ID NO: 990 - DNA, 32 bp, Mus musculus
acactagctgccagtcagttactctagtgaca

SEQ ID NO: 991 - DNA, 36 bp, Mus musculus; identical to SEQ ID NO: 979

SEQ ID NO: 992 - DNA, 37 bp, Mus musculus; identical to SEQ ID NO: 980

SEQ ID NO: 993 - DNA, 36 bp, Mus musculus; identical to SEQ ID NO: 981

SEQ ID NO: 994 - DNA, 34 bp, Mus musculus; identical to SEQ ID NO: 985

SEQ ID NO: 995 - DNA, 38 bp, Mus musculus; identical to SEQ ID NO: 986

SEQ ID NO: 996 - DNA, 38 bp, Mus musculus; identical to SEQ ID NO: 982

SEQ ID NO: 997 - DNA, 38 bp, Mus musculus; identical to SEQ ID NO: 984

SEQ ID NO: 998 - DNA, 37 bp, Mus musculus
acactagctgccagtcaagacttttactctagtgaca

SEQ ID NO: 999 - DNA, 36 bp, Mus musculus
acactagctgccagtcagcctgttactctagtgaca

SEQ ID NO: 1000 - DNA, 35 bp, Mus musculus; identical to SEQ ID NO: 987

SEQ ID NO: 1001 - DNA, 35 bp, Mus musculus
acactagctgccagtcatgtcactagagtaacagt

SEQ ID NO: 1002 - DNA, 33 bp, Mus musculus
acactagctgccagtcatgttactctagtgaca

SEQ ID NO: 1003 - DNA, 36 bp, Mus musculus; identical to SEQ ID NO: 979

SEQ ID NO: 1004 - DNA, 37 bp, Mus musculus; identical to SEQ ID NO: 980

SEQ ID NO: 1005 - DNA, 36 bp, Mus musculus; identical to SEQ ID NO: 981

SEQ ID NO: 1006 - DNA, 38 bp, Mus musculus; identical to SEQ ID NO: 984

SEQ ID NO: 1007 - DNA, 37 bp, Mus musculus; identical to SEQ ID NO: 998

SEQ ID NO: 1008 - DNA, 35 bp, Mus musculus; identical to SEQ ID NO: 1001

SEQ ID NO: 1009 - DNA, 37 bp, Mus musculus
acactaggctgccagtcaaactgttactctagtgaca

SEQ ID NO: 1010 - DNA, 34 bp, Mus musculus
acactagctgccagtctgtcactagagtaacagt

SEQ ID NO: 1011 - DNA, 36 bp, Mus musculus
acactagctgccagtccgactgttactctagtgaca

SEQ ID NO: 1012 - DNA, 36 bp, Artificial Sequence
  source: /note="Description of Artificial Sequence: Synthetic oligonucleotide"
acactagctgccagttagactgttactctagtgaca

SEQ ID NO: 1013 - DNA, 32 bp, Mus musculus
acactagctgccagttgtcactagagtaacag

SEQ ID NO: 1014 - DNA, 30 bp, Mus musculus
acactagctgccagtcatgtcactagagta

SEQ ID NO: 1015 - DNA, 51 bp, Mus musculus
ctgagcactactggagcctctgccagtcagactgttactctagtgacacaa

SEQ ID NO: 1016 - protein, 17 aa, Mus musculus
LSTTGASASQTVTLVTQ

SEQ ID NO: 1017 - DNA, 50 bp, Mus musculus
agcactcagccagtgaagctgccagtcagactgttactctagtgacacaa

SEQ ID NO: 1018 - protein, 13 aa, Mus musculus
STQPVKLPVRLLL

SEQ ID NO: 1019 - DNA, 51 bp, Mus musculus
agcactcagccagtgaagctgccagtcaagactgttactctagtgacacaa

SEQ ID NO: 1020 - protein, 17 aa, Mus musculus
STQPVKLPVKTVTLVTQ

SEQ ID NO: 1021 - DNA, 51 bp, Mus musculus
agcactcagccagtgaaggcaacactgcaagatttggaacagagacgcccc

SEQ ID NO: 1022 - protein, 17 aa, Mus musculus
STQPVKATLQDLEQRRP

SEQ ID NO: 1023 - DNA, 46 bp, Mus musculus
aagctgccagtcaagactgttactctagtgacacaatctgtggtta

SEQ ID NO: 1024 - DNA, 45 bp, Mus musculus
aagctgccagtcagactgttactctagtgacacaatctgtggtta

SEQ ID NO: 1025 - DNA, 46 bp, Mus musculus; identical to SEQ ID NO: 1023

SEQ ID NO: 1026 - DNA, 45 bp, Mus musculus; identical to SEQ ID NO: 1024

1. A nucleic acid comprising:
a sequence encoding a first DMD guide RNA targeting a first genomic target sequence,
a sequence encoding a second DMD guide RNA targeting a second genomic target sequence,
a sequence encoding a first promoter, wherein the first promoter drives expression of the sequence encoding the first DMD guide RNA, and
a sequence encoding a second promoter, wherein the second promoter drives expression of the sequence encoding the second DMD guide RNA,
wherein the first genomic target sequence and the second genomic target sequence each comprise a dystrophin splice acceptor site.

2. The nucleic acid of claim 1, wherein the sequence encoding the first promoter and the sequence encoding the second promoter are identical.

3. The nucleic acid of claim 1, wherein the sequence encoding the first promoter and the sequence encoding the second promoter not identical.

4. The nucleic acid of claim 1, wherein the first genomic target sequence and the second genomic target sequence are identical.

5. The nucleic acid of claim 1, wherein the first genomic target sequence and the second genomic target sequence are not identical.

6. The nucleic acid of claim 1, wherein the nucleic acid further comprises:
a sequence encoding a third DMD guide RNA targeting a third genomic target sequence, and
a sequence encoding a third promoter, wherein the third promoter drives expression of the sequence encoding the third DMD guide RNA,
wherein the third genomic target sequence comprises a dystrophin splice acceptor site.

7. The nucleic acid of claim 6, wherein at least two of the sequence encoding the first promoter, the sequence encoding the second promoter, and the sequence encoding the third promoter are identical.

8. The nucleic acid of claim 6, wherein at least two of the sequence encoding the first promoter, the sequence encoding the second promoter, and the sequence encoding the third promoter are not identical.

9. The nucleic acid of claim 6, wherein at least two of the first genomic target sequence, the second genomic target sequence, and the third genomic target sequence are identical.

10. The nucleic acid of claim 6, wherein at least two of the first genomic target sequence, the second genomic target sequence, and the third genomic target sequence are not identical.

11. The nucleic acid of claim 6, wherein the nucleic acid further comprises:
a sequence encoding a fourth DMD guide RNA targeting a fourth genomic target sequence, and
a sequence encoding a fourth promoter, wherein the fourth promoter drives expression of the fourth sequence encoding a DMD guide RNA,
wherein the fourth genomic target sequence comprises a dystrophin splice acceptor site.

12. The nucleic acid of claim 11, wherein at least two of the sequence encoding the first promoter, the sequence encoding the second promoter, the sequence encoding the third promoter, and the sequence encoding the fourth promoter are identical.

13. The nucleic acid of claim 11, wherein at least two of the sequence encoding the first promoter, the sequence encoding the second promoter, the sequence encoding the third promoter, and the sequence encoding the fourth promoter are not identical.

14. The nucleic acid of claim 11, wherein at least two of the first genomic target sequence, the second genomic target sequence, the third genomic target sequence, and the fourth genomic target sequence are identical.

15. The nucleic acid of claim 11, wherein at least two of the first genomic target sequence, the second genomic target sequence, the third genomic target sequence, and the fourth genomic target sequence are not identical.

16. The nucleic acid of claim 11, wherein the nucleic acid further comprises:
a sequence encoding a fifth DMD guide RNA targeting a fifth genomic target sequence, and
a sequence encoding a fifth promoter, wherein the fifth promoter drives expression of the sequence encoding the fifth DMD guide RNA, wherein the fifth genomic target sequence comprises a dystrophin splice acceptor site.

17. The nucleic acid of claim 16, wherein at least two of the sequence encoding the first promoter, the sequence encoding the second promoter, the sequence encoding the third promoter, the sequence encoding the fourth promoter, and the sequence encoding the fifth promoter are identical.

18. The nucleic acid of claim 16, wherein at least two of the sequence encoding the first promoter, the sequence encoding the second promoter, the sequence encoding the third promoter, the sequence encoding the fourth promoter, and the sequence encoding the fifth promoter are not identical.

19. The nucleic acid of claim 16, wherein at least two of the first genomic target sequence, the second genomic target sequence, the third genomic target sequence, the fourth genomic target sequence, and the fifth genomic target sequence are identical.

20. The nucleic acid of claim 16, wherein at least two of the first genomic target sequence, the second genomic target sequence, the third genomic target sequence, the fourth genomic target sequence, and the fifth genomic target sequence are not identical.

21. The nucleic acid of claim 16, wherein the nucleic acid further comprises:
at least one sequence encoding an additional DMD guide RNA targeting a genomic target sequence, and
at least one additional promoter, wherein the additional promoter drives expression of the sequence encoding the additional DMD guide RNA,
wherein the additional genomic target sequence comprises a dystrophin splice acceptor site.

22. The nucleic acid of claim 1, wherein the dystrophin splice acceptor site is the 5′ splice acceptor site of exon 51.

23. The nucleic acid of claim 1, wherein the sequence encoding the first promoter or the sequence encoding the second promoter comprises a sequence encoding a constitutive promoter.

24. The nucleic acid of claim 1, wherein the first promoter or the second promoter comprises a constitutive promoter.

25. The nucleic acid of claim 20, wherein at least one of the sequences encoding the first promoter, the sequence encoding the second promoter, the sequence encoding the third promoter, the sequence encoding the fourth promoter, and the sequence encoding the fifth promoter comprises a sequence encoding a constitutive promoter.

26. The nucleic acid of claim 20, wherein at least one of the first promoter, the second promoter, the third promoter, the fourth promoter, and the fifth promoter comprises a constitutive promoter.

27. The nucleic acid of claim 1, wherein the sequence encoding the first promoter or the sequence encoding the second promoter comprises a sequence encoding an inducible promoter.

28. The nucleic acid of claim 20, wherein at least one of the first promoter, the second promoter, the third promoter, the fourth promoter, and the fifth promoter comprises an inducible promoter.

29. The nucleic acid of claim 1, wherein the sequence encoding the first promoter or the sequence encoding the second promoter comprises a sequence encoding a cell-type specific promoter.

30. The nucleic acid of claim 20, wherein at least one of the sequences encoding the first promoter, the sequence encoding the second promoter, the sequence encoding the third promoter, the sequence encoding the fourth promoter, and the sequence encoding the fifth promoter comprises a cell-type specific promoter.

31. The nucleic acid of claim 29, wherein the sequence encoding a cell-type specific promoter comprises a sequence encoding a muscle-specific promoter.

32. The nucleic acid of claim 1, wherein the sequence encoding the first promoter or the sequence encoding the second promoter comprises a sequence encoding a U6 promoter, an H1 promoter, or a 7SK promoter.

33. The nucleic acid of claim 20, wherein at least one of the sequences encoding the first promoter, the sequence encoding the second promoter, the sequence encoding the third promoter, the sequence encoding the fourth promoter, and the sequence encoding the fifth promoter comprises a sequence encoding a U6 promoter, sequence encoding an H1 promoter, or sequence encoding a 7SK promoter.

34. The nucleic acid of claim 20, wherein at least one of the sequences encoding the first promoter, the sequence encoding the second promoter, the sequence encoding the third promoter, the sequence encoding the fourth promoter, and the sequence encoding the fifth promoter comprises sequence encoding a U6 promoter.

35. The nucleic acid of claim 20, wherein at least one of the sequences encoding the first promoter, the sequence encoding the second promoter, the sequence encoding the third promoter, the sequence encoding the fourth promoter, and the sequence encoding the fifth promoter comprises sequence encoding an H1 promoter.

36. The nucleic acid of claim 20, wherein at least one of the sequences encoding the first promoter, the sequence encoding the second promoter, the sequence encoding the third promoter, the sequence encoding the fourth promoter, and the sequence encoding the fifth promoter comprises sequence encoding a 7SK promoter.

37. The nucleic acid of claim 6,
wherein the sequence encoding the first DMD guide RNA, the sequence encoding the second DMD guide RNA, and sequence encoding the third DMD guide RNA are identical,
wherein the sequence encoding the first promoter, the sequence encoding the second promoter, and the sequence encoding the third promoter are not identical, and
wherein the 5′ splice acceptor site comprises a 5′ splice acceptor site of exon 51.

38. The nucleic acid of claim 37, wherein the sequence encoding the first promoter comprises a sequence encoding a U6 promoter, the sequence encoding the second promoter comprises a sequence encoding an H1 promoter, and the sequence encoding the third promoter comprises a sequence encoding a 7SK promoter.

39. The nucleic acid of claim 1, wherein the nucleic acid comprises a DNA sequence.

40. The nucleic acid of claim 1, wherein the nucleic acid comprises an RNA sequence.

41. The nucleic acid of claim 1, wherein the nucleic acid further comprises one or more sequences encoding an inverted terminal repeat (ITR).

42. The nucleic acid of claim 1, wherein the nucleic acid further comprises a sequence encoding a 5′ inverted terminal repeat (ITR) and a sequence encoding a 3′ ITR.

43. The nucleic acid of claim 42, wherein the sequence encoding the 5′ inverted terminal repeat (ITR) or the sequence encoding a 3′ ITR comprises a sequence isolated or derived from an adeno-associated virus (AAV).

44. The nucleic acid of claim 43, wherein the sequence encoding the 5′ inverted terminal repeat (ITR) or the sequence encoding a 3′ ITR comprises a sequence isolated or derived from an adeno-associated virus (AAV) of serotype 2 (AAV2).

45. The nucleic acid of claim 43, wherein the sequence encoding the 5′ inverted terminal repeat (ITR) and the sequence encoding a 3′ ITR comprises a sequence isolated or derived from an AAV2.

46. The nucleic acid of claim 43, wherein the sequence encoding the 5′ inverted terminal repeat (ITR) or the sequence encoding a 3′ ITR comprises a sequence isolated or derived from an adeno-associated virus (AAV) of serotype 4 (AAV4).

47. The nucleic acid of claim 46, wherein the sequence encoding the 5′ inverted terminal repeat (ITR) and the sequence encoding a 3′ ITR comprises a sequence isolated or derived from an AAV4.

48. The nucleic acid of claim 43, wherein the sequence encoding the 5′ inverted terminal repeat (ITR) or the sequence encoding a 3′ ITR comprises or consists of 145 nucleotides.

49. The nucleic acid of claim 43, wherein the sequence encoding the 5′ inverted terminal repeat (ITR) or the sequence encoding a 3′ ITR comprises or consists of 115 nucleotides.

50. The nucleic acid of claim 43, wherein the sequence encoding the 5′ inverted terminal repeat (ITR) or the sequence encoding a 3′ ITR comprises or consists of 141 nucleotides

51. The nucleic acid of claim 1, wherein the nucleic acid further comprises a polyadenosine (polyA) sequence.

52. The nucleic acid of claim 51, wherein the polyA sequence is a mini polyA sequence.

53. The nucleic acid of claim 6, wherein the sequence encoding the first DMD guide RNA, the sequence encoding the second DMD guide RNA, or the sequence encoding the third DMD guide RNA comprises the sequence of any one of SEQ ID NOs. 60-382, 706-708 and 712-719.

54. The nucleic acid of claim 6, wherein the sequence encoding the first DMD guide RNA, the sequence encoding the second DMD guide RNA, or the sequence encoding the third DMD guide RNA comprises the sequence of SEQ ID NO: 714.

55. The nucleic acid of claim 6, wherein the sequence encoding the first DMD guide RNA, the sequence encoding the second DMD guide RNA, and the sequence encoding the third DMD guide RNA comprises the sequence of SEQ ID NO: 714.

56. A cell comprising the nucleic acid of claim 1.

57. A composition comprising the nucleic acid of claim 1.

58. A cell comprising the composition of claim 56.

59. A composition comprising the cell of claim 58.

60. A vector comprising the nucleic acid of claim 1.

61. The vector of claim 60, wherein the vector further comprises a sequence encoding an inverted terminal repeat (ITR) of a transposable element.

62. The vector of claim 61, wherein the transposable element is a transposon.

63. The vector of claim 62, wherein the transposon is a Tn7 transposon.

64. The vector of claim 63, wherein the vector further comprises a sequence encoding a 5′ ITR of a T7 transposon and a sequence encoding a 3′ ITR of a T7 transposon.

65. The vector of claim 60, wherein the vector is a non-viral vector.

66. The vector of claim 65, wherein the non-viral vector is a plasmid.

67. The vector of claim 60, wherein the vector is a viral vector.

68. The vector of claim 67, wherein the viral vector is an adeno-associated viral (AAV) vector.

69. The vector of claim 69, wherein the AAV vector is replication-defective or conditionally replication defective.

70. The vector of claim 68, wherein the AAV vector is a recombinant AAV vector.

71. The vector of claim 68, wherein the AAV vector comprises a sequence isolated or derived from an AAV vector of serotype 1 (AAV1), 2 (AAV2), 3 (AAV3), 4 (AAV4), 5 (AAV5), 6 (AAV6),7 (AAV7), 8 (AAV8), 9 (AAV9), 10 (AAV10), 11 (AAV11) or any combination thereof.

72. The vector of claim 68, wherein the AAV vector comprises a sequence isolated or derived from an AAV vector of serotype 9 (AAV9).

73. The vector of claim 68, wherein the AAV vector comprises a sequence isolated or derived from an AAV vector of serotype 2 (AAV2).

74. The vector of claim 68, wherein the AAV vector comprises a sequence isolated or derived from an AAV2 and a sequence isolated or derived from an AAV9.

75. The vector of claim 68, wherein the AAV vector comprises a sequence isolated or derived from an AAV vector of serotype 4 (AAV4).

76. The vector of claim 68, wherein the AAV vector comprises a sequence isolated or derived from an AAV4 and a sequence isolated or derived from an AAV9.

77. The vector of claim 68, wherein the vector is optimized for expression in mammalian cells.

78. The vector of claim 68, wherein the vector is optimized for expression in human cells.

79. The vector of claim 68, wherein the vector comprises the nucleic acid sequence of SEQ ID NO. 914, SEQ ID NO. 915, SEQ ID NO. 916, or SEQ ID NO. 917.

80. A composition comprising the vector of claim 60.

81. The composition of claim 80, further comprising a pharmaceutically acceptable carrier.

82. A cell comprising the composition of claim 80.

83. The cell of claim 82, wherein the cell is a human cell.

84. The cell of claim 82, wherein the cell is a muscle cell or satellite cell.

85. The cell of claim 82, wherein the cell is an induced pluripotent stem (iPS) cell.

86. A composition comprising the cell of claim 82.

87. A nucleic acid comprising a sequence encoding a promoter and a sequence encoding a Cas9 protein or a nuclease domain thereof,
wherein the sequence encoding the promoter comprises a sequence encoding a muscle-specific promoter.

88. The nucleic acid of claim 87, wherein the sequence encoding the muscle-specific promoter comprises a sequence encoding a CK8 promoter.

89. The nucleic acid of claim 87, wherein the sequence encoding the muscle-specific promoter comprises a sequence encoding a CK8e promoter.

90. The nucleic acid of claim 87, wherein the sequence encoding the Cas9 protein or the nuclease domain thereof is isolated or derived from a sequence encoding an S. pyogenes Cas9 protein or a nuclease domain thereof.

91. (canceled)

92. The nucleic acid of claim 87, wherein the sequence encoding the Cas9 protein or the nuclease domain thereof is codon optimized for expression in a mammal.

93. The nucleic acid of claim 87, wherein the sequence encoding the Cas9 protein or the nuclease domain thereof is codon optimized for expression in a human.

94. The nucleic acid of claim 87, wherein the nucleic acid further comprises a polyA sequence.

95. The nucleic acid of claim 94, wherein the polyA sequence is a mini polyA sequence.

96. The nucleic acid of claim 1, wherein the nucleic acid further comprises one or more sequences encoding an inverted terminal repeat (ITR).

97. The nucleic acid of claim 1, wherein the nucleic acid further comprises a sequence encoding a 5′ inverted terminal repeat (ITR) and a sequence encoding a 3′ ITR.

98. The nucleic acid of claim 97, wherein the sequence encoding the 5′ inverted terminal repeat (ITR) or the sequence encoding a 3′ ITR comprises a sequence isolated or derived from an adeno-associated virus (AAV).

99. The nucleic acid of claim 98, wherein the sequence encoding the 5′ inverted terminal repeat (ITR) or the sequence encoding a 3′ ITR comprises a sequence isolated or derived from an adeno-associated virus (AAV) of serotype 2 (AAV2).

100. The nucleic acid of claim 99, wherein the sequence encoding the 5′ inverted terminal repeat (ITR) and the sequence encoding a 3′ ITR comprises a sequence isolated or derived from an AAV2.

101. The nucleic acid of claim 98, wherein the sequence encoding the 5′ inverted terminal repeat (ITR) or the sequence encoding a 3′ ITR comprises a sequence isolated or derived from an adeno-associated virus (AAV) of serotype 4 (AAV4).

102. The nucleic acid of claim 46, wherein the sequence encoding the 5′ inverted terminal repeat (ITR) and the sequence encoding a 3′ ITR comprises a sequence isolated or derived from an AAV4.

103. The nucleic acid of claim 96, wherein the sequence encoding the 5′ inverted terminal repeat (ITR) or the sequence encoding a 3′ ITR comprises or consists of 145 nucleotides.

104. The nucleic acid of claim 96, wherein the sequence encoding the 5′ inverted terminal repeat (ITR) or the sequence encoding a 3′ ITR comprises or consists of 115 nucleotides.

105. The nucleic acid of claim 96, wherein the sequence encoding the 5′ inverted terminal repeat (ITR) or the sequence encoding a 3′ ITR comprises or consists of 141 nucleotides.

106. The nucleic acid of claim 1, wherein the nucleic acid further comprises a nuclear localization signal.

107. The nucleic acid of claim 87, wherein the nucleic acid is optimized for expression in mammalian cells.

108. The nucleic acid of claim 87, wherein the nucleic acid is optimized for expression in human cells.

109. A composition comprising the nucleic acid of claim 87.

110. A cell comprising the nucleic acid of claim 87.

111. A cell comprising the composition of claim 109.

112. A composition comprising the cell of claim 110.

113. A vector comprising the nucleic acid of claim 87.

114. The vector of claim 113, wherein the vector further comprises a sequence encoding an inverted terminal repeat (ITR) of a transposable element.

115. The vector of claim 114, wherein the transposable element is a transposon.

116. The vector of claim 115, wherein the transposon is a Tn7 transposon.

117. The vector of claim 116, wherein the vector further comprises a sequence encoding a 5′ ITR of a T7 transposon and a sequence encoding a 3′ ITR of a T7 transposon.

118. The vector of claim 113, wherein the vector is a non-viral vector.

119. The vector of claim 118, wherein the non-viral vector is a plasmid.

120. The vector of claim 113, wherein the vector is a viral vector.

121. The vector of claim 120, wherein the viral vector is an adeno-associated viral (AAV) vector.

122. The vector of claim 121, wherein the AAV vector is replication-defective or conditionally replication defective.

123. The vector of claim 121, wherein the AAV vector is a recombinant AAV vector.

124. The vector of claim 121, wherein the AAV vector comprises a sequence isolated or derived from an AAV vector of serotype 1 (AAV1), 2 (AAV2), 3 (AAV3), 4 (AAV4), 5 (AAVS), 6 (AAV6), 7 (AAV7), 8 (AAV8), 9 (AAV9), 10 (AAV10), 11 (AAV11) or any combination thereof.

125. The vector of claim 121, wherein the AAV vector comprises a sequence isolated or derived from an AAV vector of serotype 9 (AAV9).

126. The vector of claim 121, wherein the AAV vector comprises a sequence isolated or derived from an AAV vector of serotype 2 (AAV2).

127. The vector of claim 121, wherein the AAV vector comprises a sequence isolated or derived from an AAV2 and a sequence isolated or derived from an AAV9.

128. The vector of claim 121, wherein the AAV vector comprises a sequence isolated or derived from an AAV vector of serotype 4 (AAV4).

129. The vector of claim 121, wherein the AAV vector comprises a sequence isolated or derived from an AAV4 and a sequence isolated or derived from an AAV9.

130. The vector of claim 121, wherein the vector is optimized for expression in mammalian cells.

131. The vector of claim 121, wherein the vector is optimized for expression in human cells.

132. The vector of claim 113, wherein the vector comprises the nucleic acid sequence of SEQ ID NO. 899, SEQ ID NO. 900, SEQ ID NO. 901, or SEQ ID NO. 902.

133. A composition comprising the vector of claim 113.

134. The composition of claim 133, further comprising a pharmaceutically acceptable carrier.

135. A cell comprising the composition of claim 133.

136. A cell comprising the vector of claim 113.

137. The cell of claim 135, wherein the cell is a human cell.

138. The cell of claim 135, wherein the cell is a muscle cell or satellite cell.

139. The cell of claim 135, wherein the cell is an iPS or iCM cell.

140. A composition comprising the cell of claim 135.

141. A composition comprising:
a first nucleic acid sequence comprising a nucleic acid sequence of claim 1 and
a second nucleic acid sequence comprising a nucleic acid comprising a sequence encoding a promoter and a sequence encoding a Cas9 protein or a nuclease domain thereof, wherein the sequence encoding the promoter comprises a sequence encoding a muscle-specific promoter.

142. A composition comprising
a first vector comprising a nucleic acid sequence of claim 1, and
a second vector comprising a nucleic acid sequence comprising a sequence encoding a promoter and a sequence encoding a Cas9 protein or a nuclease domain thereof, wherein the sequence encoding the promoter comprises a sequence encoding a muscle-specific promoter.

143. A composition comprising
a vector of claim 60, and
a vector comprising a sequence encoding a promoter and a sequence encoding a Cas9 protein or a nuclease domain thereof, wherein the sequence encoding the promoter comprises a sequence encoding a muscle-specific promoter.

144. The composition of claim 141, wherein the composition further comprises a pharmaceutically acceptable carrier.

145. A method for correcting a dystrophin defect, the method comprising contacting a cell and a composition of claim 141 under conditions suitable for expression of the first DMD guide RNA, the second DMD guide RNA and the Cas9 protein or a nuclease domain thereof, wherein at least one of first DMD guide RNA or the second DMD guide RNA forms a complex with the Cas9 protein or the nuclease domain thereof to form at least one DMD guide RNA-Cas9 complex, wherein the at least one DMD guide RNA-Cas9 complex disrupts a dystrophin splice site and induces selective skipping of a DMD exon.

146. A method for correcting a dystrophin defect, the method comprising contacting a cell and a composition of claim 141 under conditions suitable for expression of the first DMD guide RNA, the second DMD guide RNA and the Cas9 protein or a nuclease domain thereof, wherein at least one of first DMD guide RNA or the second DMD guide RNA forms a complex with the Cas9 protein or the nuclease domain thereof to form at least one DMD guide RNA-Cas9 complex, wherein the at least one DMD guide RNA-Cas9 complex induces a reframing of a dystrophin reading frame.

147. The method of claim 146, wherein the reframing of a dystrophin reading frame induces an insertion.

148. The method of claim 147, wherein the insertion comprises or consists of a single adenosine nucleotide.

149. A method for inducing selective skipping of a DMD exon, the method comprising contacting a cell and a composition of claim 141 under conditions suitable for expression of the first DMD guide RNA, the second DMD guide RNA and the Cas9 protein or a nuclease domain thereof, wherein at least one of first DMD guide RNA or the second DMD guide RNA forms a complex with the Cas9 protein or the nuclease domain thereof to form at least one DMD guide RNA-Cas9 complex, wherein the at least one DMD guide RNA-Cas9 complex disrupts a dystrophin splice site and induces selective skipping of a DMD exon.

150. A method for inducing a reframing event in the dystrophin reading frame, the method comprising contacting a cell and a composition of claim 141 under conditions suitable for expression of the first DMD guide RNA, the second DMD guide RNA and the Cas9 protein or a nuclease domain thereof, wherein at least one of first DMD guide RNA or the second DMD guide RNA forms a complex with the Cas9 protein or the nuclease domain thereof to form at least one DMD guide RNA-Cas9 complex, wherein the at least one DMD guide RNA-Cas9 complex disrupts a dystrophin splice site and induces reframing of the dystrophin reading frame.

151. The method of claim 145, wherein the at least one DMD guide RNA-Cas9 complex disrupts a dystrophin splice site and induces selective skipping of exon 51 of a human DMD gene.

152. A cell produced by the method of claim 145.

153. A method of treating muscular dystrophy in a subject in need thereof comprising administering to the subject a therapeutically effective amount of a composition of claim 141.

154. The method of claim 153, wherein the composition is administered locally.

155. The method of claim 153, wherein the composition is administered directly to a muscle tissue.

156. The method of claim 153, wherein the composition is administered by an intramuscular infusion or injection.

157. The method of claim 155, wherein the muscle tissue comprises a tibialis anterior tissue, a quadriceps tissue, a soleus tissue, a diaphragm tissue, or a heart tissue.

158. The method of claim 153, wherein the composition is administered by an intra-cardiac injection.

159. The method of claim 153, wherein the composition is administered systemically.

160. The method of claim 159, wherein the composition is administered by an intravenous infusion or injection.

161. The method of claim 153, wherein, following administration of the composition, the subject exhibits normal dystrophin-positive myofibers, and mosaic dystrophin-positive myofibers containing centralized nuclei, or a combination thereof.

162. The method of claim 153, wherein, following administration of the composition, the subject exhibits an emergence or an increase in a level of abundance of normal dystrophin-positive myofibers when compared to an absence or an level of abundance of normal dystrophin-positive myofibers prior to administration of the composition.

163. The method of claim 153, wherein, following administration of the composition, the subject exhibits an emergence or an increase in a level of abundance of mosaic dystrophin-positive myofibers containing centralized nuclei when compared to an absence or an level of abundance of mosaic dystrophin-positive myofibers containing centralized nuclei prior to administration of the composition.

164. The method of claim 153, wherein, following administration of the composition, the subject exhibits a decreased serum CK level when compared to a serum CK level prior to administration of the composition.

165. The method of claim 153, wherein, following administration of the composition, the subject exhibits improved grip strength when compared to a grip strength prior to administration of the composition.

166. The method of claim 153, wherein the subject is a neonate, an infant, a child, a young adult, or an adult.

167. The method of claim 153, wherein the subject has muscular dystrophy.

168. The method of claim 153, wherein the subject is a genetic carrier for muscular dystrophy.

169. The method of claim 153, wherein the subject is male.

170. The method of claim 153, wherein the subject is female.

171. The method of claim 153, wherein the subject appears to be asymptomatic and wherein a genetic diagnosis reveals a mutation in one or both copies of a DMD gene that impairs function of the DMD gene product.

172. The method of claim 153, wherein the subject presents an early sign or symptom of muscular dystrophy.

173. The method of claim 172, wherein the early sign or symptom of muscular dystrophy comprises loss of muscle mass or proximal muscle weakness.

174. The method of claim 173, wherein the loss of muscle mass or proximal muscle weakness occurs in one or both leg(s) and/or a pelvis, followed by one or more upper body muscle(s).

175. The method of claim 174, wherein the early sign or symptom of muscular dystrophy further comprises pseudohypertrophy, low endurance, difficulty standing, difficulty walking, difficulty ascending a staircase or a combination thereof.

176. The method of claim 153, wherein the subject presents a progressive sign or symptom of muscular dystrophy.

177. The method of claim 176, wherein the progressive sign or symptom of muscular dystrophy comprises muscle tissue wasting, replacement of muscle tissue with fat, or replacement of muscle tissue with fibrotic tissue.

178. The method of claim 153, wherein the subject presents a later sign or symptom of muscular dystrophy.

179. The method of claim 178, wherein the later sign or symptom of muscular dystrophy comprises abnormal bone development, curvature of the spine, loss of movement, and paralysis.

180. The method of claim 153, wherein the subject presents a neurological sign or symptom of muscular dystrophy.

181. The method of claim 180, wherein the neurological sign or symptom of muscular dystrophy comprises intellectual impairment and paralysis.

182. The method of claim 153, wherein the administration of the composition occurs prior to the subject presenting one or more progressive, later or neurological signs or symptoms of muscular dystrophy.

183. The method of claim 153, wherein the subject is less than 10 years old.

184. The method of claim 183, wherein the subject is less than 5 years old.

185. The method of claim 184, wherein the subject is less than 2 years old.

186. (canceled)
